(19) United States
(12) Patent Application Publication
(10) Pub. No.: US 2024/0327838 A1
(43) Pub. Date: Oct. 3, 2024

(54) MODULATORS OF ENaC EXPRESSION

(71) Applicant: IONIS PHARMACEUTICALS, INC., Carlsbad, CA (US)

(72) Inventors: Jeffrey R. Crosby, Carlsbad, CA (US); Shuling Guo, Carlsbad, CA (US); Huynh-Hoa Bui, Carlsbad, CA (US); Andrew T. Watt, Carlsbad, CA (US); Susan M. Freier, Carlsbad, CA (US)

(21) Appl. No.: 18/492,683

(22) Filed: Oct. 23, 2023

Related U.S. Application Data
(63) Continuation of application No. 16/759,908, filed on Apr. 28, 2020, now abandoned.
(60) Provisional application No. 62/743,669, filed on Oct. 10, 2018.
(60) Provisional application No. 62/579,640, filed on Oct. 31, 2017.

(51) Int. Cl. C12N 15/113; A61K 9/00; A61K 31/404; A61K 31/47; A61K 31/7105; A61K 31/713; A61M 11/00; A61P 11/00

(52) U.S. Cl. CPC C12N 15/113; A61K 9/0019; A61K 9/0075; A61K 9/0078; A61K 31/404; A61K 31/47; A61K 31/7105; A61K 31/713; A61P 11/00; A61M 11/005; C12N 2310/14; C12N 2310/315; C12N 2310/321; C12N 2310/3231; C12N 2310/3341; C12N 2310/341; C12N 2310/345; C12N 2310/346; C12N 2320/31; C12N 2320/32; C12N 2320/35

(57) ABSTRACT

The present embodiments provide methods, compounds, and compositions useful for inhibiting ENaC expression, which may be useful for treating, preventing, or ameliorating a disease associated with ENaC.

### SEQUENCE LISTING

[0001] The present application is being filed along with a Sequence Listing in electronic format. The Sequence Listing is provided as a file entitled BIOL0315SEQ.xml created Oct. 10, 2023, which is 1,828 kb in size. The information in the electronic format of the sequence listing is incorporated herein by reference in its entirety.

### FIELD

[0002] The present embodiments provide methods, compounds, and compositions useful for inhibiting ENaC expression, which can be useful for treating, preventing, or ameliorating a disease associated with ENaC.

### BACKGROUND

[0003] The epithelial sodium channel (ENaC) is a channel made up of three subunits (typically α-ENaC, (β-ENaC, and γ-ENaC; or SCNN1A, SCNN1B, and SCNN1G, respectively) that is expressed in several tissues, including the lungs. It allows passage of sodium ions across the epithelial cell membrane and is negatively regulated by chloride ions. In cystic fibrosis patients, the inhibition of ENaC is reduced due to decreased function of the chloride transporter, CFTR.

### SUMMARY

[0004] Certain embodiments provided herein are directed to potent and tolerable compounds and compositions useful for inhibiting ENaC expression, which can be useful for treating, preventing, ameliorating, or slowing progression of lung disorders, e.g., cystic fibrosis, chronic obstructive pulmonary disease (COPD), chronic bronchitis, and asthma. Certain embodiments provided herein comprise modified oligonucleotides complementary to an α-ENaC nucleic acid that potently reduce α-ENaC expression in animals.

### DETAILED DESCRIPTION

[0005] It is to be understood that both the foregoing general description and the following detailed description are exemplary and explanatory only and are not restrictive of the embodiments, as claimed. Herein, the use of the singular includes the plural unless specifically stated otherwise. As used herein, the use of “or” means “and/or” unless stated otherwise. Furthermore, the use of the term “including” as well as other forms, such as “includes” and “included”, is not limiting.

[0006] The section headings used herein are for organizational purposes only and are not to be construed as limiting the subject matter described. All documents, or portions of documents, cited in this application, including, but not limited to, patents, patent applications, articles, books, treatises, and GenBank and NCBI reference sequence records are hereby expressly incorporated by reference for the portions of the document discussed herein, as well as in their entirety.

[0007] It is understood that the sequence set forth in each SEQ ID NO contained herein is independent of any modification to a sugar moiety, an internucleoside linkage, or a nucleobase. As such, compounds defined by a SEQ ID NO may comprise, independently, one or more modifications to a sugar moiety, an internucleoside linkage, or a nucleobase.

[0008] As used herein, “2′-deoxynucleoside” means a nucleoside comprising 2′-H(H) ribosyl sugar moiety, as found in naturally occurring deoxyribonucleic acids (DNA). In certain embodiments, a 2′-deoxynucleoside may comprise a modified nucleobase or may comprise an RNA nucleobase (uracil).

[0009] As used herein, “2′-substituted nucleoside” or “2-modified nucleoside” means a nucleoside comprising a 2′-substituted or 2′-modified sugar moiety. As used herein, “2′-substituted” or “2-modified” in reference to a furanosyl sugar moiety means a sugar moiety comprising at least one 2′-substituent group other than H or OH.

[0010] As used herein, “administration” or “administering” refers to routes of introducing a compound or composition provided herein to an individual to perform its intended function. An example of a route of administration that can be used includes, but is not limited to, administration by inhalation.

[0011] As used herein, “administered concomitantly” or “co-administration” means administration of two or more compounds in any manner in which the pharmacological effects of both are manifest in the patient. Concomitant administration does not require that both compounds be administered in a single pharmaceutical composition, in the same dosage form, by the same route of administration, or at the same time. The effects of both compounds need not manifest themselves at the same time. The effects need only be overlapping for a period of time and need not be coextensive. Concomitant administration or co-administration encompasses administration in parallel or sequentially.

[0012] As used herein, “animal” refers to a human or non-human animal, including, but not limited to, mice, rats, rabbits, dogs, cats, pigs, and non-human primates, including, but not limited to, monkeys and chimpanzees.

[0013] As used herein, “antisense activity” means any detectable and/or measurable change attributable to the hybridization of an antisense compound to its target nucleic acid. In certain embodiments, antisense activity is a decrease in the amount or expression of a target nucleic acid or protein encoded by such target nucleic acid compared to target nucleic acid levels or target protein levels in the absence of the antisense compound.

[0014] As used herein, “antisense compound” means a compound comprising an antisense oligonucleotide and optionally one or more additional features, such as a conjugate group or terminal group.

[0015] As used herein, “antisense oligonucleotide” means an oligonucleotide having a nucleobase sequence that is at least partially complementary to a target nucleic acid.

[0016] As used herein, “ameliorate” in reference to a treatment means improvement in at least one symptom relative to the same symptom in the absence of the treatment. In certain embodiments, amelioration is the reduction in the severity or frequency of a symptom or the delayed onset or slowing of progression in the severity or frequency of a symptom.

[0017] As used herein, “bicyclic nucleoside” or “BNA” means a nucleoside comprising a bicyclic sugar moiety. As used herein, “bicyclic sugar” or “bicyclic sugar moiety” means a modified sugar moiety comprising two rings, wherein the second ring is formed via a bridge connecting two of the atoms in the first ring thereby forming a bicyclic structure. In certain embodiments, the first ring of the bicyclic sugar moiety is a furanosyl moiety. In certain embodiments, the bicyclic sugar moiety does not comprise a furanosyl moiety.

[0018] As used herein, “cEt” or “constrained ethyl” means a bicyclic sugar moiety, wherein the first ring of the bicyclic sugar moiety is a ribosyl sugar moiety, the second ring of the bicyclic sugar is formed via a bridge connecting the 4′-carbon and the 2′-carbon, the bridge has the formula 4′-CH(CH₃)—O-2′, and the methyl group of the bridge is in the S configuration. A cEt bicyclic sugar moiety is in the β-D configuration.

[0019] As used herein, “chirally enriched population” means a plurality of molecules of identical molecular formula, wherein the number or percentage of molecules within the population that contain a particular stereochemical configuration at a particular chiral center is greater than the number or percentage of molecules expected to contain the same particular stereochemical configuration at the same particular chiral center within the population if the particular chiral center were stereorandom. Chirally enriched populations of molecules having multiple chiral centers within each molecule may contain one or more sterorandom chiral centers. In certain embodiments, the molecules are modified oligonucleotides. In certain embodiments, the molecules are compounds comprising modified oligonucleotides.

[0020] As used herein, “complementary” in reference to an oligonucleotide means that at least 70% of the nucleobases of such oligonucleotide or one or more regions thereof and the nucleobases of another nucleic acid or one or more regions thereof are capable of hydrogen bonding with one another when the nucleobase sequence of the oligonucleotide and the other nucleic acid are aligned in opposing directions. Complementary nucleobases are nucleobase pairs that are capable of forming hydrogen bonds with one another. Complementary nucleobase pairs include adenine (A) and thymine (T), adenine (A) and uracil (U), cytosine (C) and guanine (G), 5-methyl cytosine (^{m}C) and guanine (G). Complementary oligonucleotides and/or nucleic acids need not have nucleobase complementarity at each nucleoside. Rather, some mismatches are tolerated. As used herein, “fully complementary” or “100% complementary” in reference to oligonucleotides means that such oligonucleotides are complementary to another oligonucleotide or nucleic acid at each nucleoside of the oligonucleotide.

[0021] As used herein, “conjugate group” means a group of atoms that is directly or indirectly attached to an oligonucleotide. Conjugate groups include a conjugate moiety and a conjugate linker that attaches the conjugate moiety to the oligonucleotide.

[0022] As used herein, “conjugate linker” means a group of atoms comprising at least one bond that connects a conjugate moiety to an oligonucleotide.

[0023] As used herein, “conjugate moiety” means a group of atoms that is attached to an oligonucleotide via a conjugate linker.

[0024] As used herein, “contiguous” in the context of an oligonucleotide refers to nucleosides, nucleobases, sugar moieties, or internucleoside linkages that are immediately adjacent to each other. For example, “contiguous nucleobases” means nucleobases that are immediately adjacent to each other in a sequence.

[0025] As used herein, “double-stranded antisense compound” means an antisense compound comprising two oligomeric compounds that are complementary to each other and form a duplex, and wherein one of the two said oligomeric compounds comprises an antisense oligonucleotide.

[0026] As used herein, “effective amount” means the amount of compound sufficient to effectuate a desired physiological outcome in an individual in need of the compound. The effective amount may vary among individuals depending on the health and physical condition of the individual to be treated, the taxonomic group of the individuals to be treated, the formulation of the composition, assessment of the individual's medical condition, and other relevant factors.

[0027] As used herein, “efficacy” means the ability to produce a desired effect.

[0028] As used herein “ENaC” means any ENaC (epithelial sodium channel) nucleic acid or protein. “ENaC nucleic acid” means any nucleic acid encoding an ENaC subunit. For example, in certain embodiments, an ENaC nucleic acid includes a DNA chromosomal region encoding ENaC, an RNA transcribed from DNA encoding ENaC (e.g., a pre-mRNA transcript), and an mRNA transcript encoding ENaC. In certain embodiments, an ENaC nucleic acid or protein is an α-ENaC or SCNN1A (sodium channel epithelial 1 alpha subunit) nucleic acid or protein. Herein, α-ENaC and SCNN1A are used interchangeably and have the same meaning.

[0029] As used herein, “expression” includes all the functions by which a gene's coded information is converted into structures present and operating in a cell. Such structures include, but are not limited to, the products of transcription and translation.

[0030] As used herein, “gapmer” means an oligonucleotide, such as an antisense oligonucleotide, comprising an internal segment having a plurality of nucleosides that support RNase H cleavage positioned between external segments, each having one or more nucleosides, wherein the nucleosides comprising the internal segment are chemically distinct from the immediately adjacent nucleoside or nucleosides comprising the external segments. The internal segment may be referred to as the “gap” or “gap segment” and the external segments may be referred to as the “wings” or “wing segments”.

[0031] As used herein, “hybridization” means the pairing or annealing of complementary oligonucleotides and/or nucleic acids. While not limited to a particular mechanism, the most common mechanism of hybridization involves hydrogen bonding, which may be Watson-Crick, Hoogsteen or reversed Hoogsteen hydrogen bonding, between complementary nucleobases.

[0032] As used herein, “individual” means a human or non-human animal selected for treatment or therapy.

[0033] As used herein, “inhibiting the expression or activity” refers to a reduction or blockade of the expression or activity relative to the expression or activity in an untreated or control sample and does not necessarily indicate a total elimination of expression or activity.

[0034] As used herein, the terms “internucleoside linkage” means a group or bond that forms a covalent linkage between adjacent nucleosides in an oligonucleotide. As used herein “modified internucleoside linkage” means any internucleoside linkage other than a naturally occurring, phosphate internucleoside linkage. Non-phosphate linkages are referred to herein as modified internucleoside linkages. “Phosphorothioate linkage” means a modified phosphate linkage in which one of the non-bridging oxygen atoms is replaced with a sulfur atom. A phosphorothioate internucleoside linkage is a modified internucleoside linkage. Modified internucleoside linkages include linkages that comprise abasic nucleosides.

[0035] As used herein, “abasic nucleoside” means a sugar moiety in an oligonucleotide or oligomeric compound that is not directly connected to a nucleobase. In certain embodiments, an abasic nucleoside is adjacent to one or two nucleosides in an oligonucleotide.

[0036] As used herein, “linker-nucleoside” means a nucleoside that links, either directly or indirectly, an oligonucleotide to a conjugate moiety. Linker-nucleosides are located within the conjugate linker of an oligomeric compound. Linker-nucleosides are not considered part of the oligonucleotide portion of an oligomeric compound even if they are contiguous with the oligonucleotide.

[0037] As used herein, “non-bicyclic modified sugar” or “non-bicyclic modified sugar moiety” means a modified sugar moiety that comprises a modification, such as a substitutent, that does not form a bridge between two atoms of the sugar to form a second ring.

[0038] As used herein, “linked nucleosides” are nucleosides that are connected in a continuous sequence (i.e. no additional nucleosides are present between those that are linked).

[0039] As used herein, “mismatch” or “non-complementary” means a nucleobase of a first oligonucleotide that is not complementary with the corresponding nucleobase of a second oligonucleotide or target nucleic acid when the first and second oligomeric compound are aligned.

[0040] As used herein, “modulating” refers to changing or adjusting a feature in a cell, tissue, organ or organism. For example, modulating ENaC expression can mean to increase or decrease the level of an ENaC RNA and/or an ENaC protein in a cell, tissue, organ or organism. A “modulator” effects the change in the cell, tissue, organ or organism. For example, a compound that modulates ENaC expression can be a modulator that decreases the amount of an ENaC RNA and/or an ENaC protein in a cell, tissue, organ or organism.

[0041] As used herein, “MOE” means methoxyethyl. “2′-MOE” or “2′-O-methoxyethyl” means a 2′-OCH₂CH₂OCH₃ group in place of the 2′-OH group of a ribosyl ring.

[0042] As used herein, “motif” means the pattern of unmodified and/or modified sugar moieties, nucleobases, and/or internucleoside linkages, in an oligonucleotide.

[0043] As used herein, “naturally occurring” means found in nature.

[0044] As used herein, “nucleobase” means an unmodified nucleobase or a modified nucleobase. As used herein an “unmodified nucleobase” is adenine (A), thymine (T), cytosine (C), uracil (U), and guanine (G). As used herein, a modified nucleobase is a group of atoms capable of pairing with at least one unmodified nucleobase. A universal base is a nucleobase that can pair with any one of the five unmodified nucleobases.

[0045] As used herein, “nucleobase sequence” means the order of contiguous nucleobases in a nucleic acid or oligonucleotide independent of any sugar or internucleoside linkage modification.

[0046] As used herein, “nucleoside” means a moiety comprising a nucleobase and a sugar moiety. The nucleobase and sugar moiety are each, independently, unmodified or modified. As used herein, “modified nucleoside” means a nucleoside comprising a modified nucleobase and/or a modified sugar moiety.

[0047] As used herein, “oligomeric compound” means a compound consisting of an oligonucleotide and optionally one or more additional features, such as a conjugate group or terminal group.

[0048] As used herein, “oligonucleotide” means a strand of linked nucleosides connected via internucleoside linkages, wherein each nucleoside and internucleoside linkage may be modified or unmodified. Unless otherwise indicated, oligonucleotides consist of 8-50 linked nucleosides. As used herein, “modified oligonucleotide” means an oligonucleotide, wherein at least one nucleoside or internucleoside linkage is modified. As used herein, “unmodified oligonucleotide” means an oligonucleotide that does not comprise any nucleoside modifications or internucleoside modifications.

[0049] As used herein, “pharmaceutically acceptable carrier or diluent” means any substance suitable for use in administering to an animal. Certain such carriers enable pharmaceutical compositions to be formulated as, for example, liquids, powders, or suspensions that can be aerosolized or otherwise dispersed for inhalation by a subject. In certain embodiments, a pharmaceutically acceptable carrier or diluent is sterile water; sterile saline; or sterile buffer solution.

[0050] As used herein “pharmaceutically acceptable salts” means physiologically and pharmaceutically acceptable salts of compounds, such as oligomeric compounds, i.e., salts that retain the desired biological activity of the parent compound and do not impart undesired toxicological effects thereto.

[0051] As used herein “pharmaceutical composition” means a mixture of substances suitable for administering to a subject. For example, a pharmaceutical composition may comprise an antisense compound and an aqueous solution.

[0052] As used herein, “phosphorus moiety” means a group of atoms comprising a phosphorus atom. In certain embodiments, a phosphorus moiety comprises a mono-, di-, or tri-phosphate, or phosphorothioate.

[0053] As used herein “prodrug” means a therapeutic agent in a form outside the body that is converted to a different form within the body or cells thereof. Typically conversion of a prodrug within the body is facilitated by the action of an enzymes (e.g., endogenous or viral enzyme) or chemicals present in cells or tissues and/or by physiologic conditions.

[0054] As used herein, “RNAi compound” means an antisense compound that acts, at least in part, through RISC or Ago2 to modulate a target nucleic acid and/or protein encoded by a target nucleic acid. RNAi compounds include, but are not limited to double-stranded siRNA, single-stranded RNA (ssRNA), and microRNA, including microRNA mimics. In certain embodiments, an RNAi compound modulates the amount, activity, and/or splicing of a target nucleic acid. The term RNAi compound excludes antisense oligonucleotides that act through RNase H.

[0055] As used herein, the term “single-stranded” in reference to an antisense compound means such a compound consisting of one oligomeric compound that is not paired with a second oligomeric compound to form a duplex. “Self-complementary” in reference to an oligonucleotide means an oligonucleotide that at least partially hybridizes to itself. A compound consisting of one oligomeric compound, wherein the oligonucleotide of the oligomeric compound is self-complementary, is a single-stranded compound. A single-stranded antisense or oligomeric compound may be capable of binding to a complementary oligomeric compound to form a duplex, in which case the compound would no longer be single-stranded.

[0056] As used herein, “standard cell assay” means the assay described in Example 3 and reasonable variations thereof.

[0057] As used herein, “standard in vivo experiment” means the procedure described in Example 4, 6, or 7, and reasonable variations thereof.

[0058] As used herein, “stereorandom chiral center” in the context of a population of molecules of identical molecular formula means a chiral center having a random stereochemical configuration. For example, in a population of molecules comprising a stereorandom chiral center, the number of molecules having the (S) configuration of the stereorandom chiral center may be but is not necessarily the same as the number of molecules having the (R) configuration of the stereorandom chiral center. The stereochemical configuration of a chiral center is considered random when it is the result of a synthetic method that is not designed to control the stereochemical configuration. In certain embodiments, a stereorandom chiral center is a stereorandom phosphorothioate internucleoside linkage.

[0059] As used herein, “sugar moiety” means an unmodified sugar moiety or a modified sugar moiety. As used herein, “unmodified sugar moiety” means a 2′-OH(H) ribosyl moiety, as found in RNA (an “unmodified RNA sugar moiety”), or a 2′-H(H) moiety, as found in DNA (an “unmodified DNA sugar moiety”). As used herein, “modified sugar moiety” or “modified sugar” means a modified furanosyl sugar moiety or a sugar surrogate. As used herein, modified furanosyl sugar moiety means a furanosyl sugar comprising a non-hydrogen substituent in place of at least one hydrogen of an unmodified sugar moiety. In certain embodiments, a modified furanosyl sugar moiety is a 2′-substituted sugar moiety. Such modified furanosyl sugar moieties include bicyclic sugars and non-bicyclic sugars. As used herein, “sugar surrogate” means a modified sugar moiety having other than a furanosyl moiety that can link a nucleobase to another group, such as an internucleoside linkage, conjugate group, or terminal group in an oligonucleotide. Modified nucleosides comprising sugar surrogates can be incorporated into one or more positions within an oligonucleotide and such oligonucleotides are capable of hybridizing to complementary oligomeric compounds or nucleic acids.

[0060] As used herein, “target nucleic acid,” “target RNA,” “target RNA transcript” and “nucleic acid target” mean a nucleic acid that an antisense compound is designed to affect.

[0061] As used herein, “target region” means a portion of a target nucleic acid to which an antisense compound is designed to hybridize.

[0062] As used herein, “terminal group” means a chemical group or group of atoms that is covalently linked to a terminus of an oligonucleotide.

[0063] As used herein, “terminal wing nucleoside” means a nucleoside that is located at the terminus of a wing segment of a gapmer. Any wing segment that comprises or consists of at least two nucleosides has two termini: one that is immediately adjacent to the gap segment; and one that is at the end opposite the gap segment. Thus, any wing segment that comprises or consists of at least two nucleosides has two terminal nucleosides, one at each terminus.

[0064] As used herein, “therapeutically effective amount” means an amount of a compound, pharmaceutical agent, or composition that provides a therapeutic benefit to an individual.

[0065] As used herein, “treat” refers to administering a compound or pharmaceutical composition to an animal in order to effect an alteration or improvement of a disease, disorder, or condition in the animal.

### Certain Embodiments

[0066] Certain embodiments provide methods, compounds and compositions for inhibiting ENaC expression.

[0067] Certain embodiments provide compounds comprising or consisting of oligonucleotides complementary to an α-ENaC or SCNN1A nucleic acid. In certain embodiments, the α-ENaC or SCNN1A nucleic acid has the sequence set forth in RefSeq or GenBank Accession No. NM_001038.5 (disclosed herein as SEQ ID NO: 1), the complement of NC_000012.12 truncated from nucleosides 6343001 to 6380000 (disclosed herein as SEQ ID NO: 2), or NG_011945.1 (disclosed herein as SEQ ID NO: 1957). In certain embodiments, the compound is an antisense compound or oligomeric compound. In certain embodiments, the compound is single-stranded. In certain embodiments, the compound is double-stranded.

[0068] Certain embodiments provide a compound comprising a modified oligonucleotide 8 to 50 linked nucleosides in length and having a nucleobase sequence comprising at least 8 contiguous nucleobases of any of the nucleobase sequences of SEQ ID NOs: 6-1954. In certain embodiments, the compound is an antisense compound or oligomeric compound. In certain embodiments, the compound is single-stranded. In certain embodiments, the compound is double-stranded. In certain embodiments, the modified oligonucleotide is 10 to 30 linked nucleosides in length.

[0069] Certain embodiments provide a compound comprising a modified oligonucleotide 8 to 50 linked nucleosides in length and having a nucleobase sequence comprising at least 8 contiguous nucleobases of any of the nucleobase sequences of SEQ ID NOs: 6 to 1954. For example, the nucleobase sequence of the modified oligonucleotide comprises or consists of any one of SEQ ID NOs 6, 7, etc. . . . or 1954. In certain embodiments, the nucleobase sequence of the modified oligonucleotide comprises or consists of SEQ ID NO: 167. In certain embodiments, the nucleobase sequence of the modified oligonucleotide comprises or consists of SEQ ID NO: 244. In certain embodiments, the nucleobase sequence of the modified oligonucleotide comprises or consists of SEQ ID NO: 399. In certain embodiments, the nucleobase sequence of the modified oligonucleotide comprises or consists of SEQ ID NO: 428. In certain embodiments, the nucleobase sequence of the modified oligonucleotide comprises or consists of SEQ ID NO: 431. In certain embodiments, the nucleobase sequence of the modified oligonucleotide comprises or consists of SEQ ID NO: 438. In certain embodiments, the nucleobase sequence of the modified oligonucleotide comprises or consists of SEQ ID NO: 590. In certain embodiments, the nucleobase sequence of the modified oligonucleotide comprises or consists of SEQ ID NO: 824. In certain embodiments, the nucleobase sequence of the modified oligonucleotide comprises or consists of SEQ ID NO: 935. In certain embodiments, the nucleobase sequence of the modified oligonucleotide comprises or consists of SEQ ID NO: 1049. In certain embodiments, the nucleobase sequence of the modified oligonucleotide comprises or consists of SEQ ID NO: 1114. In certain embodiments, the nucleobase sequence of the modified oligonucleotide comprises or consists of SEQ ID NO: 1124. In certain embodiments, the nucleobase sequence of the modified oligonucleotide comprises or consists of SEQ ID NO: 1134. In certain embodiments, the nucleobase sequence of the modified oligonucleotide comprises or consists of SEQ ID NO: 1139. In certain embodiments, the nucleobase sequence of the modified oligonucleotide comprises or consists of SEQ ID NO: 1145. In certain embodiments, the nucleobase sequence of the modified oligonucleotide comprises or consists of SEQ ID NO: 1170. In certain embodiments, the nucleobase sequence of the modified oligonucleotide comprises or consists of SEQ ID NO: 1530. In certain embodiments, the nucleobase sequence of the modified oligonucleotide comprises or consists of SEQ ID NO: 1532. In certain embodiments, the nucleobase sequence of the modified oligonucleotide comprises or consists of SEQ ID NO: 1672. In certain embodiments, the nucleobase sequence of the modified oligonucleotide comprises or consists of SEQ ID NO: 1730. In certain embodiments, the nucleobase sequence of the modified oligonucleotide comprises or consists of SEQ ID NO: 1802. In certain embodiments, the nucleobase sequence of the modified oligonucleotide comprises or consists of SEQ ID NO: 1832. In certain embodiments, the compound is an antisense compound or oligomeric compound. In certain embodiments, the compound is single-stranded. In certain embodiments, the compound is double-stranded. In certain embodiments, the modified oligonucleotide is 10 to 30 linked nucleosides in length. In certain embodiments, the modified oligonucleotide has a nucleobase sequence comprising at least 12 contiguous nucleobases of any of SEQ ID Numbers from 6 to 1954.

[0070] Certain embodiments provide a compound comprising a modified oligonucleotide 10 to 50 linked nucleosides in length and having a nucleobase sequence comprising at least 10 contiguous nucleobases of any of the nucleobase sequences of SEQ ID NOs: 6-1954. In certain embodiments, the compound is an antisense compound or oligomeric compound. In certain embodiments, the compound is single-stranded. In certain embodiments, the compound is double-stranded. In certain embodiments, the modified oligonucleotide is 10 to 30 linked nucleosides in length.

[0071] Certain embodiments provide a compound comprising a modified oligonucleotide 11 to 50 linked nucleosides in length and having a nucleobase sequence comprising at least 11 contiguous nucleobases of any of the nucleobase sequences of SEQ ID NOs: 6-1954. In certain embodiments, the compound is an antisense compound or oligomeric compound. In certain embodiments, the compound is single-stranded. In certain embodiments, the compound is double-stranded. In certain embodiments, the modified oligonucleotide is 11 to 30 linked nucleosides in length.

[0072] Certain embodiments provide a compound comprising a modified oligonucleotide 12 to 50 linked nucleosides in length and having a nucleobase sequence comprising at least 12 contiguous nucleobases of any of the nucleobase sequences of SEQ ID NOs: 6-1954. In certain embodiments, the compound is an antisense compound or oligomeric compound. In certain embodiments, the compound is single-stranded. In certain embodiments, the compound is double-stranded. In certain embodiments, the modified oligonucleotide is 12 to 30 linked nucleosides in length.

[0073] In certain embodiments, the compound comprises a modified oligonucleotide 30 linked nucleosides in length. In certain embodiments, the compound is an antisense compound or oligomeric compound.

[0074] Certain embodiments provide a compound comprising a modified oligonucleotide 16 to 50 linked nucleosides in length and having a nucleobase sequence comprising the nucleobase sequence of any one of SEQ ID NOs: 6-1954. In certain embodiments, the compound is an antisense compound or oligomeric compound. In certain embodiments, the compound is single-stranded. In certain embodiments, the compound is double-stranded. In certain embodiments, the modified oligonucleotide is 16 to 30 linked nucleosides in length.

[0075] Certain embodiments provide a compound comprising a modified oligonucleotide consisting of the nucleobase sequence of any one of SEQ ID NOs: 6-1954. In certain embodiments, the compound is an antisense compound or oligomeric compound. In certain embodiments, the compound is single-stranded. In certain embodiments, the compound is double-stranded.

[0076] In certain embodiments, compounds comprise or consist of modified oligonucleotides complementary to an intron of an α-ENaC nucleic acid transcript. In certain embodiments, modified oligonucleotides are complementary to intron 1, intron 2, intron 3, intron 4, intron 5, intron 6, intron 7, intron 8, intron 9, intron 10, intron 11, or intron 12 of an α-ENaC nucleic acid transcript. In certain such embodiments, modified oligonucleotides are complementary to a sequence within nucleotides 4,497-5,163; 5,634-16,290; 16,559-17,759; 17,951-24,120; 24,225-24,565; 24,730-25,152; 25,252-25,445; 25,564-30,595; 30,675-30,779; 30,838-30,995; 31,052-31,198; or 31,275-31,747 of SEQ ID NO: 2. In certain embodiments, compounds comprise or consist of oligonucleotides having at least an 8, 9, 10, 11, 12, 13, 14, 15, or 16 contiguous nucleobase portion complementary to an equal length portion of intron 1, intron 2, intron 3, intron 4, intron 5, intron 6, intron 7, intron 8, intron 9, intron 10, intron 11, or intron 12 of an α-ENaC nucleic acid transcript. In certain embodiments, such oligonucleotides have at least an 8, 9, 10, 11, 12, 13, 14, 15, or 16 contiguous nucleobase portion complementary to an equal length portion within nucleotides 4,497-5,163; 5,634-16,290; 16,559-17,759; 17,951-24,120; 24,225-24,565; 24,730-25,152; 25,252-25,445; 25,564-30,595; 30,675-30,779; 30,838-30,995; 31,052-31,198; or 31,275-31,747 of SEQ ID NO: 2. In certain embodiments, these compounds are antisense compounds or oligomeric compounds. Compounds comprising modified oligonucleotide complementary to nearly any portion of certain introns of an α-ENaC nucleic acid transcript, e.g., intron 4 of an α-ENaC pre-mRNA, are generally especially potent and tolerable. Thus, such certain introns can be considered hot spot regions for targeting an α-ENaC nucleic acid transcript.

[0077] In certain embodiments, compounds comprise or consist of modified oligonucleotides complementary to intron 4 or the 3′-UTR of an α-ENaC nucleic acid transcript. In certain embodiments, modified oligonucleotides are complementary to a sequence within nucleotides 17,951-24,120; or 32,129-33,174 of SEQ ID NO: 2. In certain embodiments, compounds comprise or consist of oligonucleotides having at least an 8, 9, 10, 11, 12, 13, 14, 15, or 16 contiguous nucleobase portion complementary to an equal length portion of intron 4 or the 3′-UTR of an α-ENaC nucleic acid transcript. In certain embodiments, such oligonucleotides have at least an 8, 9, 10, 11, 12, 13, 14, 15, or 16 contiguous nucleobase portion complementary to an equal length portion within nucleotides 17,951-24,120; or 32,129-33,174 of SEQ ID NO: 2. In certain embodiments, these compounds are antisense compounds or oligomeric compounds.

[0078] In certain embodiments, a compound comprises a modified oligonucleotide 8 to 50 linked nucleosides in length and having at least an 8, 9, 10, 11, 12, 13, 14, 15, or 16 contiguous nucleobase portion complementary to an equal length portion within nucleotides 19,022-19,037; 20,415-20,430; 21,750-21,766; 32,844-32,859; or 32,989-33,004 of SEQ ID NO: 2. In certain embodiments, the modified oligonucleotide is 10 to 30 linked nucleosides in length.

[0079] In certain embodiments, a compound comprises a modified oligonucleotide 8 to 50 linked nucleosides in length and complementary within nucleotides 19,022-19,037; 20,415-20,430; 21,750-21,766; 32,844-32,859; or 32,989-33,004 of SEQ ID NO: 2. In certain embodiments, the modified oligonucleotide is 10 to 30 linked nucleosides in length.

[0080] In certain embodiments, a compound comprises a modified oligonucleotide 8 to 50 linked nucleosides in length and having a nucleobase sequence comprising at least an 8, 9, 10, 11, 12, 13, 14, 15, or 16 contiguous nucleobase portion of the nucleobase sequence of any one of compound numbers 797308, 797495, 826763, 827307, 827359, or 827392 (SEQ ID NOs: 239, 426, 1541, 1812, 1113, or 593). In certain embodiments, the modified oligonucleotide is 10 to 30 linked nucleosides in length. In certain embodiments, the nucleobase sequence of the modified oligonucleotide comprises or consists of SEQ ID NO: 239. In certain embodiments, the nucleobase sequence of the modified oligonucleotide comprises or consists of SEQ ID NO: 426. In certain embodiments, the nucleobase sequence of the modified oligonucleotide comprises or consists of SEQ ID NO: 1541. In certain embodiments, the nucleobase sequence of the modified oligonucleotide comprises or consists of SEQ ID NO: 1812. In certain embodiments, the nucleobase sequence of the modified oligonucleotide comprises or consists of SEQ ID NO: 1113. In certain embodiments, the nucleobase sequence of the modified oligonucleotide comprises or consists of SEQ ID NO: 593.

[0081] In certain embodiments, a compound comprises a modified oligonucleotide 8 to 50 linked nucleosides in length and having a nucleobase sequence comprising the nucleobase sequence of any one of compound numbers 797308, 797495, 826763, 827307, 827359, or 827392 (SEQ ID NOs: 239, 426, 1541, 1812, 1113, or 593). In certain embodiments, the modified oligonucleotide is 10 to 30 linked nucleosides in length.

[0082] In certain embodiments, a compound comprises a modified oligonucleotide having a nucleobase sequence consisting of the nucleobase sequence of any one of compound numbers 797308, 797495, 826763, 827307, 827359, or 827392 (SEQ ID NOs: 239, 426, 1541, 1812, 1113, or 593).

[0083] In certain embodiments, a compound comprising or consisting of a modified oligonucleotide complementary to α-ENaC is compound number 827359. Out of over 1,900 compounds that were screened as described in the Examples section below, compound numbers 797308, 797495, 826763, 827307, 827359, and 827392 emerged as the top lead compounds. In particular, compound number 827359 exhibited the best combination of properties in terms of potency and tolerability out of over 1,900 compounds.

[0084] Any of the foregoing oligonucleotides is a modified oligonucleotide comprising at least one modified internucleoside linkage, at least one modified sugar, and/or at least one modified nucleobase.

[0085] In certain embodiments, any of the foregoing modified oligonucleotides comprises at least one modified sugar. In certain embodiments, at least one modified sugar comprises a 2′-MOE modification. In certain embodiments, at least one modified sugar is a bicyclic sugar, such as a cEt bicyclic sugar, an LNA bicyclic sugar, or an ENA bicyclic sugar.

[0086] In certain embodiments, the modified oligonucleotide comprises at least one modified internucleoside linkage, such as a phosphorothioate internucleoside linkage.

[0087] In certain embodiments, any of the foregoing modified oligonucleotides comprises at least one modified nucleobase, such as 5-methylcytosine.

[0088] In certain embodiments, any of the foregoing modified oligonucleotides comprises: a gap segment consisting of linked 2′-deoxynucleosides;
[0089] a 5′ wing segment consisting of linked nucleosides; and
[0090] a 3′ wing segment consisting of linked nucleosides;
[0091] wherein the gap segment is positioned between the 5′ wing segment and the 3′ wing segment and
[0092] wherein each nucleoside of each wing segment comprises a modified sugar. In certain embodiments, the modified oligonucleotide is 16 to 50 linked nucleosides in length having a nucleobase sequence comprising the sequence recited in any one of SEQ ID NO: 239, 426, 1541, 1812, 1113, or 593. In certain embodiments, the modified oligonucleotide is 10 to 30 linked nucleosides in length having a nucleobase sequence comprising the sequence recited in any one of SEQ ID NOs: 239, 426, 1541, 1812, 1113, or 593. In certain embodiments, the modified oligonucleotide is 16 linked nucleosides in length having a nucleobase sequence consisting of the sequence recited in any one of SEQ ID NOs: 239, 426, 1541, 1812, 1113, or 593.

[0093] In certain embodiments, a compound comprises or consists of a modified oligonucleotide 20-80 linked nucleobases in length having a nucleobase sequence comprising the sequence recited in any one of SEQ ID NOs: 239, 426, 1541, 1812, 1113, or 593, wherein the modified oligonucleotide comprises a gap segment consisting of ten linked 2′-deoxynucleosides;
[0094] a 5′ wing segment consisting of five linked nucleosides; and
[0095] a 3′ wing segment consisting of five linked nucleosides;
[0096] wherein the gap segment is positioned between the 5′ wing segment and the 3′ wing segment, wherein each nucleoside of each wing segment comprises a 2′-O-methoxyethyl sugar; wherein each internucleoside linkage is a phosphorothioate linkage and wherein each cytosine is a 5-methylcytosine. In certain embodiments, the modified oligonucleotide consists of 20-30 linked nucleosides. In certain embodiments, the modified oligonucleotide consists of 20 linked nucleosides.

[0097] In certain embodiments, a compound comprises or consists of a modified oligonucleotide 16-80 linked nucleobases in length having a nucleobase sequence comprising the sequence recited in any one of SEQ ID NOs: 239, 426, 1541, 1812, 1113, or 593, wherein the modified oligonucleotide comprises a gap segment consisting of ten linked 2′-deoxynucleosides;
[0098] a 5′ wing segment consisting of three linked nucleosides; and
[0099] a 3′ wing segment consisting of three linked nucleosides;
[0100] wherein the gap segment is positioned between the 5′ wing segment and the 3′ wing segment; wherein the nucleosides of the 5′ wing segment each comprise a cEt bicyclic sugar; wherein the nucleosides of the 3′ wing segment each comprises a cEt bicyclic sugar; wherein each internucleoside linkage is a phosphorothioate linkage; and wherein each cytosine is a 5-methylcytosine. In certain embodiments, the modified oligonucleotide is 16-80 linked nucleosides in length. In certain embodiments, the modified oligonucleotide is 16-30 linked nucleosides in length.

[0101] In certain embodiments, a compound comprises or consists of a modified oligonucleotide according to one of the following formulas:

(SEQ ID NO: 1963)
mCks mCks mCks Gds Ads Tds Ads Gds mCds Tds Gds
Gds Tds Tks Gks Tk;
(SEQ ID NO: 1964)
Aks Aks Gks Tds Ads Tds Gds Gds Tds Gds mCds Ads
Ads mCks Aks Gk;
(SEQ ID NO: 1965)
Aks mCks Gks Ads Tds Tds Ads mCds Ads Gds Gds
Gds Ads Tks Tks mCk;
(SEQ ID NO: 1966)
Tks Gks mCks Ads Tds Ads Gds Gds Ads Gds Tds Tds
mCds Tks mCks Tk;
(SEQ ID NO: 1967)
Aks Gks Aks Gds Tds Ads Ads Tds Gds Ads Ads Ads
mCds mCks mCks Ak;
(SEQ ID NO: 1968)
mCks Gks Aks Tds Tds Ads mCds Ads Gds Gds Gds
Ads Tds Tks mCks Ak;

wherein A=an adenine, mC=a 5-methylcytosine, G=a guanine, T=a thymine, k=a cEt sugar moiety, d=a 2′-deoxyribosyl sugar moiety, and s=a phosphorothioate internucleoside linkage.

[0102] In certain embodiments, a compound comprises or consists of compound 827359 or salt thereof, a modified oligonucleotide having the following chemical structure:

[chemical structure]

[0103] In certain embodiments, a compound comprises or consists of the sodium salt of compound 827359, having the following chemical structure:

[chemical structure]

[0104] In any of the foregoing embodiments, the compound or oligonucleotide can be at least 85%, at least 90%, at least 95%, at least 98%, at least 99%, or 100% complementary to a nucleic acid encoding α-ENaC.

[0105] In any of the foregoing embodiments, the compound can be single-stranded. In certain embodiments, the compound comprises 2′-deoxyribonucleosides. In certain embodiments, the compound is double-stranded. In certain embodiments, the compound is double-stranded and comprises ribonucleosides. In any of the foregoing embodiments, the compound can be an antisense compound or oligomeric compound.

[0106] In any of the foregoing embodiments, the compound can be 8 to 80, 10 to 30, 12 to 50, 13 to 30, 13 to 50, 14 to 30, 14 to 50, 15 to 30, 15 to 50, 16 to 30, 16 to 50, 17 to 30, 17 to 50, 18 to 22, 18 to 24, 18 to 30, 18 to 50, 19 to 22, 19 to 30, 19 to 50, or 20 to 30 linked nucleosides in length. In certain embodiments, the compound comprises or consists of an oligonucleotide.

[0107] In certain embodiments, a compound comprises a modified oligonucleotide described herein and a conjugate group. In certain embodiments, the conjugate group is linked to the modified oligonucleotide at the 5′ end of the modified oligonucleotide. In certain embodiments, the conjugate group is linked to the modified oligonucleotide at the 3′ end of the modified oligonucleotide.

[0108] In certain embodiments, compounds or compositions provided herein comprise a salt of the modified oligonucleotide. In certain embodiments, the salt is a sodium salt. In certain embodiments, the salt is a potassium salt.

[0109] In certain embodiments, the compounds or compositions as described herein are active by virtue of having at least one of an in vitro IC₅₀ of less than 250 nM, less than 200 nM, less than 150 nM, less than 100 nM, less than 90 nM, less than 80 nM, less than 70 nM, less than 65 nM, less than 60 nM, less than 55 nM, less than 50 nM, less than 45 nM, less than 40 nM, less than 35 nM, less than 30 nM, less than 25 nM, less than 20 nM, or less than 15 nM in a standard cell assay.

[0110] In certain embodiments, the compounds or compositions as described herein are highly tolerable as demonstrated by having at least one of an increase an alanine transaminase (ALT) or aspartate transaminase (AST) value of no more than 4 fold, 3 fold, 2 fold, or 1.5 fold over saline treated animals or an increase in liver, spleen, or kidney weight of no more than 30%, 20%, 15%, 12%, 10%, 5%, or 2% compared to control treated animals. In certain embodiments, the compounds or compositions as described herein are highly tolerable as demonstrated by having no increase of ALT or AST over control treated animals. In certain embodiments, the compounds or compositions as described herein are highly tolerable as demonstrated by having no increase in liver, spleen, or kidney weight over control animals.

[0111] Certain embodiments provide a composition comprising the compound of any of the aforementioned embodiments or salt thereof and at least one of a pharmaceutically acceptable carrier or diluent. In certain embodiments, the composition has a viscosity less than about 40 centipoise (cP), less than about 30 cP, less than about 20 cP, less than about 15 cP, less than about 10 cP, less than about 5 cP, or less than about 3 cP, or less than about 1.5 cP. In certain embodiments, the composition having any of the aforementioned viscosities comprises a compound provided herein at a concentration of about 15 mg/mL, 20 mg/mL, 25 mg/mL, or about 50 mg/mL. In certain embodiments, the composition having any of the aforementioned viscosities and/or compound concentrations has a temperature of room temperature or about 20° C., about 21° C., about 22° C., about 23° C., about 24° C., about 25° C., about 26° C., about 27° C., about 28° C., about 29° C., or about 30° C.

[0112] Any of the foregoing compounds can be used for treating, preventing, or ameliorating a disease associated with ENaC as further described herein.

### Certain Indications

[0113] Certain embodiments provided herein relate to methods of inhibiting ENaC expression, which can be useful for treating, preventing, or ameliorating a disease associated with ENaC in an individual, by administration of a compound that targets α-ENaC. In certain embodiments, the compound can be an α-ENaC inhibitor. In certain embodiments, the compound can be an antisense compound, oligomeric compound, or oligonucleotide complementary to α-ENaC. In certain embodiments, the compound can be any of the compounds described herein.

[0114] Examples of diseases associated with ENaC that are treatable, preventable, and/or ameliorable with the methods provided herein include cystic fibrosis, COPD, asthma, and chronic bronchitis.

[0115] In certain embodiments, a method of treating, preventing, or ameliorating a disease associated with α-ENaC in an individual comprises administering to the individual a compound comprising an α-ENaC inhibitor, thereby treating, preventing, or ameliorating the disease. In certain embodiments, the compound comprises an antisense compound targeted to α-ENaC. In certain embodiments, the compound comprises an oligonucleotide complementary to an α-ENaC nucleic acid transcript. In certain embodiments, the oligonucleotide is a modified oligonucleotide. In certain embodiments, the compound comprise a modified oligonucleotide complementary to an intron of an α-ENaC nucleic acid transcript. In certain embodiments, the modified oligonucleotide is complementary to intron 1, intron 2, intron 3, intron 4, intron 5, intron 6, intron 7, intron 8, intron 9, intron 10, intron 11, or intron 12 of an α-ENaC nucleic acid transcript. In certain such embodiments, the oligonucleotide is complementary to a sequence within nucleotides 4,497-5,163; 5,634-16,290; 16,559-17,759; 17,951-24,120; 24,225-24,565; 24,730-25,152; 25,252-25,445; 25,564-30,595; 30,675-30,779; 30,838-30,995; 31,052-31,198; or 31,275-31,747 of SEQ ID NO: 2. In certain embodiments, the compound comprises a modified oligonucleotide 8 to 50 linked nucleosides in length and having a nucleobase sequence comprising at least 8 contiguous nucleobases of any of the nucleobase sequences of SEQ ID NOs: 6-1954. In certain embodiments, the compound comprises a modified oligonucleotide 12 to 50 linked nucleosides in length and having a nucleobase sequence comprising the nucleobase sequence of any one of SEQ ID NOs: 6-1954. In certain embodiments, the compound comprises a modified oligonucleotide consisting of the nucleobase sequence of any one of SEQ ID NOs: 6-1954. In certain embodiments, the compound comprises a modified oligonucleotide 16 to 50 linked nucleosides in length having a nucleobase sequence comprising any one of SEQ ID NOs: 239, 426, 1541, 1812, 1113, or 593. In certain embodiments, the compound comprises a modified oligonucleotide having a nucleobase sequence consisting of any one of SEQ ID NOs: 239, 426, 1541, 1812, 1113, or 593. In any of the foregoing embodiments, the modified oligonucleotide can be 10 to 30 linked nucleosides in length. In certain embodiments, the compound is compound number 797308, 797495, 826763, 827307, 827359, or 827392. In any of the foregoing embodiments, the compound can be single-stranded or double-stranded. In any of the foregoing embodiments, the compound can be an antisense compound or oligomeric compound. In certain embodiments, the compound is administered to the individual via inhalation. In certain embodiments, administering the compound improves or preserves spirometry or mucociliary clearance.

[0116] In certain embodiments, a method of treating, preventing, or ameliorating cystic fibrosis, COPD, asthma, or chronic bronchitis comprises administering to the individual a compound comprising a modified oligonucleotide complementary to an α-ENaC nucleic acid, thereby treating, preventing, or ameliorating cystic fibrosis, COPD, asthma, or chronic bronchitis. In certain embodiments, the compound is an antisense compound targeted to α-ENaC. In certain embodiments, the oligonucleotide is a modified oligonucleotide. In certain embodiments, the compound comprise a modified oligonucleotide complementary to an intron of an α-ENaC nucleic acid transcript. In certain embodiments, the modified oligonucleotide is complementary to intron 1, intron 2, intron 3, intron 4, intron 5, intron 6, intron 7, intron 8, intron 9, intron 10, intron 11, or intron 12 of an α-ENaC nucleic acid transcript. In certain such embodiments, the oligonucleotide is complementary to a sequence within nucleotides 4,497-5,163; 5,634-16,290; 16,559-17,759; 17,951-24,120; 24,225-24,565; 24,730-25,152; 25,252-25,445; 25,564-30,595; 30,675-30,779; 30,838-30,995; 31,052-31,198; or 31,275-31,747 of SEQ ID NO: 2. In certain embodiments, the compound comprises a modified oligonucleotide 8 to 50 linked nucleosides in length and having a nucleobase sequence comprising at least 8 contiguous nucleobases of any of the nucleobase sequences of SEQ ID NOs: 6-1954. In certain embodiments, the compound comprises a modified oligonucleotide 12 to 50 linked nucleosides in length and having a nucleobase sequence comprising the nucleobase sequence of any one of SEQ ID NOs: 6-1954. In certain embodiments, the compound comprises a modified oligonucleotide consisting of the nucleobase sequence of any one of SEQ ID NOs: 6-1954. In certain embodiments, the compound comprises a modified oligonucleotide of 16 to 50 linked nucleosides in length having a nucleobase sequence comprising any one of SEQ ID NOs: 239, 426, 1541, 1812, 1113, or 593. In certain embodiments, the compound comprises a modified oligonucleotide having a nucleobase sequence consisting of any one of SEQ ID NOs: 239, 426, 1541, 1812, 1113, or 593. In any of the foregoing embodiments, the modified oligonucleotide can be 10 to 30 linked nucleosides in length. In certain embodiments, the compound is compound number 797308, 797495, 826763, 827307, 827359, or 827392. In any of the foregoing embodiments, the compound can be single-stranded or double-stranded. In any of the foregoing embodiments, the compound can be an antisense compound or oligomeric compound. In certain embodiments, the compound is administered to the individual via inhalation. In certain embodiments, administering the compound improves or preserves lung function. In certain such embodiments, spirometry or mucociliary clearance is improved or preserved. In certain such embodiments, forced expiratory volume in one second (FEV₁), FVC, or FEF₂₅₋₇₅ is increased. In certain embodiments, pulmonary exacerbations, hospitalization rate or frequency, or antibiotic use is decreased. In certain embodiments, quality of life is improved, as measured by the respiratory questionnaire, CFQ-R. In certain embodiments, the individual is identified as having or at risk of having a disease associated with ENaC.

[0117] In certain embodiments, a method of inhibiting expression of α-ENaC in an individual having, or at risk of having, a disease associated with ENaC comprises administering to the individual a compound comprising an α-ENaC inhibitor, thereby inhibiting expression of α-ENaC in the individual. In certain embodiments, administering the compound inhibits expression of α-ENaC in the lung. In certain embodiments, the individual has, or is at risk of having cystic fibrosis, COPD, asthma, or chronic bronchitis. In certain embodiments, the compound comprises an antisense compound targeted to α-ENaC. In certain embodiments, the compound comprises an oligonucleotide complementary to an α-ENaC nucleic acid transcript. In certain embodiments, the oligonucleotide is a modified oligonucleotide. In certain embodiments, the compound comprise a modified oligonucleotide complementary to an intron of an α-ENaC nucleic acid transcript. In certain embodiments, the modified oligonucleotide is complementary to intron 1, intron 2, intron 3, intron 4, intron 5, intron 6, intron 7, intron 8, intron 9, intron 10, intron 11, or intron 12 of an α-ENaC nucleic acid transcript. In certain such embodiments, the oligonucleotide is complementary to a sequence within nucleotides 4,497-5,163; 5,634-16,290; 16,559-17,759; 17,951-24,120; 24,225-24,565; 24,730-25,152; 25,252-25,445; 25,564-30,595; 30,675-30,779; 30,838-30,995; 31,052-31,198; or 31,275-31,747 of SEQ ID NO: 2. In certain embodiments, the compound comprises a modified oligonucleotide 8 to 50 linked nucleosides in length and having a nucleobase sequence comprising at least 8 contiguous nucleobases of any of the nucleobase sequences of SEQ ID NOs: 6-1954. In certain embodiments, the compound comprises a modified oligonucleotide 12 to 50 linked nucleosides in length and having a nucleobase sequence comprising the nucleobase sequence of any one of SEQ ID NOs: 6-1954. In certain embodiments, the compound comprises a modified oligonucleotide consisting of the nucleobase sequence of any one of SEQ ID NOs: 6-1954. In certain embodiments, the compound comprises a modified oligonucleotide 16 to 50 linked nucleosides in length having a nucleobase sequence comprising any one of SEQ ID NOs: 239, 426, 1541, 1812, 1113, or 593. In certain embodiments, the compound comprises a modified oligonucleotide having a nucleobase sequence consisting of any one of SEQ ID NOs: 239, 426, 1541, 1812, 1113, or 593. In any of the foregoing embodiments, the modified oligonucleotide can be 10 to 30 linked nucleosides in length. In certain embodiments, the compound is compound number 797308, 797495, 826763, 827307, 827359, or 827392. In any of the foregoing embodiments, the compound can be single-stranded or double-stranded. In any of the foregoing embodiments, the compound can be an antisense compound or oligomeric compound. In certain embodiments, the compound is administered to the individual via inhalation. In certain embodiments, administering the compound improves or preserves spirometry or mucociliary clearance. In certain embodiments, the individual is identified as having or at risk of having a disease associated with ENaC.

[0118] In certain embodiments, a method of inhibiting expression of α-ENaC in a cell comprises contacting the cell with a compound comprising an α-ENaC inhibitor, thereby inhibiting expression of α-ENaC in the cell. In certain embodiments, the cell is a lung cell. In certain embodiments, the cell is in the lung. In certain embodiments, the cell is in the lung of an individual who has, or is at risk of having cystic fibrosis, COPD, asthma, or chronic bronchitis. In certain embodiments, the compound comprises an antisense compound targeted to α-ENaC. In certain embodiments, the compound comprises an oligonucleotide complementary to an α-ENaC nucleic acid transcript. In certain embodiments, the oligonucleotide is a modified oligonucleotide. In certain embodiments, the compound comprise a modified oligonucleotide complementary to an intron of an α-ENaC nucleic acid transcript. In certain embodiments, the modified oligonucleotide is complementary to intron 1, intron 2, intron 3, intron 4, intron 5, intron 6, intron 7, intron 8, intron 9, intron 10, intron 11, or intron 12 of an α-ENaC nucleic acid transcript. In certain such embodiments, the oligonucleotide is complementary to a sequence within nucleotides 4,497-5,163; 5,634-16,290; 16,559-17,759; 17,951-24,120; 24,225-24,565; 24,730-25,152; 25,252-25,445; 25,564-30,595; 30,675-30,779; 30,838-30,995; 31,052-31,198; or 31,275-31,747 of SEQ ID NO: 2. In certain embodiments, the compound comprises a modified oligonucleotide 8 to 50 linked nucleosides in length and having a nucleobase sequence comprising at least 8 contiguous nucleobases of any of the nucleobase sequences of SEQ ID NOs: 6-1954. In certain embodiments, the compound comprises a modified oligonucleotide 12 to 50 linked nucleosides in length and having a nucleobase sequence comprising the nucleobase sequence of any one of SEQ ID NOs: 6-1954. In certain embodiments, the compound comprises a modified oligonucleotide consisting of the nucleobase sequence of any one of SEQ ID NOs: 6-1954. In certain embodiments, the compound comprises a modified oligonucleotide 16 to 50 linked nucleosides in length having a nucleobase sequence comprising any one of SEQ ID NOs: 239, 426, 1541, 1812, 1113, or 593. In certain embodiments, the compound comprises a modified oligonucleotide having a nucleobase sequence consisting of any one of SEQ ID NOs: 239, 426, 1541, 1812, 1113, or 593. In any of the foregoing embodiments, the modified oligonucleotide can be 10 to 30 linked nucleosides in length. In certain embodiments, the compound is compound number 797308, 797495, 826763, 827307, 827359, or 827392. In any of the foregoing embodiments, the compound can be single-stranded or double-stranded. In any of the foregoing embodiments, the compound can be an antisense compound or oligomeric compound.

[0119] In certain embodiments, a method of increasing or improving spirometry or mucociliary clearance in the lung of an individual having, or at risk of having, a disease associated with ENaC comprises administering to the individual a compound comprising an α-ENaC inhibitor, thereby increasing or improving spirometry or mucociliary clearance in the lung of the individual. In certain such embodiments, forced expiratory volume in one second (FEV₁), FVC, or FEF₂₅₋₇₅ is increased. In certain embodiments, pulmonary exacerbations, hospitalization rate or frequency, or antibiotic use is decreased. In certain embodiments, quality of life is improved, as measured by the respiratory questionnaire, CFQ-R. In certain embodiments, the individual has, or is at risk of having, cystic fibrosis, COPD, asthma, or chronic bronchitis. In certain embodiments, the compound comprises an antisense compound targeted to α-ENaC. In certain embodiments, the compound comprises an oligonucleotide complementary to an α-ENaC nucleic acid transcript. In certain embodiments, the oligonucleotide is a modified oligonucleotide. In certain embodiments, the compound comprise a modified oligonucleotide complementary to an intron of an α-ENaC nucleic acid transcript. In certain embodiments, the modified oligonucleotide is complementary to intron 1, intron 2, intron 3, intron 4, intron 5, intron 6, intron 7, intron 8, intron 9, intron 10, intron 11, or intron 12 of an α-ENaC nucleic acid transcript. In certain such embodiments, the oligonucleotide is complementary to a sequence within nucleotides 4,497-5,163; 5,634-16,290; 16,559-17,759; 17,951-24,120; 24,225-24,565; 24,730-25,152; 25,252-25,445; 25,564-30,595; 30,675-30,779; 30,838-30,995; 31,052-31,198; or 31,275-31,747 of SEQ ID NO: 2. In certain embodiments, the compound comprises a modified oligonucleotide 8 to 50 linked nucleosides in length and having a nucleobase sequence comprising at least 8 contiguous nucleobases of any of the nucleobase sequences of SEQ ID NOs: 6-1954. In certain embodiments, the compound comprises a modified oligonucleotide 12 to 50 linked nucleosides in length and having a nucleobase sequence comprising the nucleobase sequence of any one of SEQ ID NOs: 6-1954. In certain embodiments, the compound comprises a modified oligonucleotide consisting of the nucleobase sequence of any one of SEQ ID NOs: 6-1954. In certain embodiments, the compound comprises a modified oligonucleotide 16 to 50 linked nucleosides in length having a nucleobase sequence comprising any one of SEQ ID NOs: 239, 426, 1541, 1812, 1113, or 593. In certain embodiments, the compound comprises a modified oligonucleotide having a nucleobase sequence consisting of any one of SEQ ID NOs: 239, 426, 1541, 1812, 1113, or 593. In any of the foregoing embodiments, the modified oligonucleotide can be 10 to 30 linked nucleosides in length. In certain embodiments, the compound is compound number 797308, 797495, 826763, 827307, 827359, or 827392. In any of the foregoing embodiments, the compound can be single-stranded or double-stranded. In any of the foregoing embodiments, the compound can be an antisense compound or oligomeric compound. In certain embodiments, the compound is administered to the individual via inhalation. In certain embodiments, the individual is identified as having or at risk of having a disease associated with ENaC.

[0120] Certain embodiments are drawn to a compound comprising an α-ENaC inhibitor for use in treating a disease associated with ENaC. In certain embodiments, the disease is cystic fibrosis, COPD, asthma, or chronic bronchitis. In certain embodiments, the compound comprises an antisense compound targeted to α-ENaC. In certain embodiments, the compound comprises an oligonucleotide complementary to an α-ENaC nucleic acid transcript. In certain embodiments, the oligonucleotide is a modified oligonucleotide. In certain embodiments, the compound comprise a modified oligonucleotide complementary to an intron of an α-ENaC nucleic acid transcript. In certain embodiments, the modified oligonucleotide is complementary to intron 1, intron 2, intron 3, intron 4, intron 5, intron 6, intron 7, intron 8, intron 9, intron 10, intron 11, or intron 12 of an α-ENaC nucleic acid transcript. In certain such embodiments, the oligonucleotide is complementary to a sequence within nucleotides 4,497-5,163; 5,634-16,290; 16,559-17,759; 17,951-24,120; 24,225-24,565; 24,730-25,152; 25,252-25,445; 25,564-30,595; 30,675-30,779; 30,838-30,995; 31,052-31,198; or 31,275-31,747 of SEQ ID NO: 2. In certain embodiments, the compound comprises a modified oligonucleotide 8 to 50 linked nucleosides in length and having a nucleobase sequence comprising at least 8 contiguous nucleobases of any of the nucleobase sequences of SEQ ID NOs: 6-1954. In certain embodiments, the compound comprises a modified oligonucleotide 12 to 50 linked nucleosides in length and having a nucleobase sequence comprising the nucleobase sequence of any one of SEQ ID NOs: 6-1954. In certain embodiments, the compound comprises a modified oligonucleotide consisting of the nucleobase sequence of any one of SEQ ID NOs: 6-1954. In certain embodiments, the compound comprises a modified oligonucleotide 16 to 50 linked nucleosides in length having a nucleobase sequence comprising any one of SEQ ID NOs: 239, 426, 1541, 1812, 1113, or 593. In certain embodiments, the compound comprises a modified oligonucleotide having a nucleobase sequence consisting of any one of SEQ ID NOs: 239, 426, 1541, 1812, 1113, or 593. In any of the foregoing embodiments, the modified oligonucleotide can be 10 to 30 linked nucleosides in length. In certain embodiments, the compound is compound number 797308, 797495, 826763, 827307, 827359, or 827392. In any of the foregoing embodiments, the compound can be single-stranded or double-stranded. In any of the foregoing embodiments, the compound can be an antisense compound or oligomeric compound.

[0121] Certain embodiments are drawn to a compound comprising an α-ENaC inhibitor for use in increasing or improving spirometry or mucociliary clearance of an individual having or at risk of having cystic fibrosis, COPD, asthma, or chronic bronchitis. In certain embodiments, the compound comprises an antisense compound targeted to α-ENaC. In certain embodiments, the compound comprises an oligonucleotide complementary to an α-ENaC nucleic acid transcript. In certain embodiments, the oligonucleotide is a modified oligonucleotide. In certain embodiments, the compound comprise a modified oligonucleotide complementary to an intron of an α-ENaC nucleic acid transcript. In certain embodiments, the modified oligonucleotide is complementary to intron 1, intron 2, intron 3, intron 4, intron 5, intron 6, intron 7, intron 8, intron 9, intron 10, intron 11, or intron 12 of an α-ENaC nucleic acid transcript. In certain such embodiments, the oligonucleotide is complementary to a sequence within nucleotides 4,497-5,163; 5,634-16,290; 16,559-17,759; 17,951-24,120; 24,225-24,565; 24,730-25,152; 25,252-25,445; 25,564-30,595; 30,675-30,779; 30,838-30,995; 31,052-31,198; or 31,275-31,747 of SEQ ID NO: 2. In certain embodiments, the compound comprises a modified oligonucleotide 8 to 50 linked nucleosides in length and having a nucleobase sequence comprising at least 8 contiguous nucleobases of any of the nucleobase sequences of SEQ ID NOs: 6-1954. In certain embodiments, the compound comprises a modified oligonucleotide 12 to 50 linked nucleosides in length and having a nucleobase sequence comprising the nucleobase sequence of any one of SEQ ID NOs: 6-1954. In certain embodiments, the compound comprises a modified oligonucleotide consisting of the nucleobase sequence of any one of SEQ ID NOs: 6-1954. In certain embodiments, the compound comprises a modified oligonucleotide 16 to 50 linked nucleosides in length having a nucleobase sequence comprising any one of SEQ ID NOs: 239, 426, 1541, 1812, 1113, or 593. In certain embodiments, the compound comprises a modified oligonucleotide having a nucleobase sequence consisting of any one of SEQ ID NOs: 239, 426, 1541, 1812, 1113, or 593. In any of the foregoing embodiments, the modified oligonucleotide can be 10 to 30 linked nucleosides in length. In certain embodiments, the compound is compound number 797308, 797495, 826763, 827307, 827359, or 827392. In any of the foregoing embodiments, the compound can be single-stranded or double-stranded. In any of the foregoing embodiments, the compound can be an antisense compound or oligomeric compound.

[0122] Certain embodiments are drawn to use of a compound comprising an α-ENaC inhibitor for the manufacture or preparation of a medicament for treating a disease associated with ENaC. Certain embodiments are drawn to use of a compound comprising an α-ENaC inhibitor for the preparation of a medicament for treating a disease associated with ENaC. In certain embodiments, the disease is cystic fibrosis, COPD, asthma, or chronic bronchitis. In certain embodiments, the compound comprises an antisense compound targeted to α-ENaC. In certain embodiments, the compound comprises an oligonucleotide complementary to an α-ENaC nucleic acid transcript. In certain embodiments, the oligonucleotide is a modified oligonucleotide. In certain embodiments, the compound comprise a modified oligonucleotide complementary to an intron of an α-ENaC nucleic acid transcript. In certain embodiments, the modified oligonucleotide is complementary to intron 1, intron 2, intron 3, intron 4, intron 5, intron 6, intron 7, intron 8, intron 9, intron 10, intron 11, or intron 12 of an α-ENaC nucleic acid transcript. In certain such embodiments, the oligonucleotide is complementary to a sequence within nucleotides 4,497-5,163; 5,634-16,290; 16,559-17,759; 17,951-24,120; 24,225-24,565; 24,730-25,152; 25,252-25,445; 25,564-30,595; 30,675-30,779; 30,838-30,995; 31,052-31,198; or 31,275-31,747 of SEQ ID NO: 2. In certain embodiments, the compound comprises a modified oligonucleotide 8 to 50 linked nucleosides in length and having a nucleobase sequence comprising at least 8 contiguous nucleobases of any of the nucleobase sequences of SEQ ID NOs: 6-1954. In certain embodiments, the compound comprises a modified oligonucleotide 12 to 50 linked nucleosides in length and having a nucleobase sequence comprising the nucleobase sequence of any one of SEQ ID NOs: 6-1954. In certain embodiments, the compound comprises a modified oligonucleotide consisting of the nucleobase sequence of any one of SEQ ID NOs: 6-1954. In certain embodiments, the compound comprises a modified oligonucleotide 16 to 50 linked nucleosides in length having a nucleobase sequence comprising any one of SEQ ID NOs: 239, 426, 1541, 1812, 1113, or 593. In certain embodiments, the compound comprises a modified oligonucleotide having a nucleobase sequence consisting of any one of SEQ ID NOs: 239, 426, 1541, 1812, 1113, or 593. In any of the foregoing embodiments, the modified oligonucleotide can be 10 to 30 linked nucleosides in length. In certain embodiments, the compound is compound number 797308, 797495, 826763, 827307, 827359, or 827392. In any of the foregoing embodiments, the compound can be single-stranded or double-stranded. In any of the foregoing embodiments, the compound can be an antisense compound or oligomeric compound.

[0123] Certain embodiments are drawn to use of a compound comprising an α-ENaC inhibitor for the manufacture or preparation of a medicament for increasing or improving spirometry or mucociliary clearance in an individual having or at risk of having cystic fibrosis, COPD, asthma, or chronic bronchitis. In certain embodiments, the compound comprises an antisense compound targeted to α-ENaC. In certain embodiments, the compound comprises an oligonucleotide complementary to an α-ENaC nucleic acid transcript. In certain embodiments, the oligonucleotide is a modified oligonucleotide. In certain embodiments, the compound comprise a modified oligonucleotide complementary to an intron of an α-ENaC nucleic acid transcript. In certain embodiments, the modified oligonucleotide is complementary to intron 1, intron 2, intron 3, intron 4, intron 5, intron 6, intron 7, intron 8, intron 9, intron 10, intron 11, or intron 12 of an α-ENaC nucleic acid transcript. In certain such embodiments, the oligonucleotide is complementary to a sequence within nucleotides 4,497-5,163; 5,634-16,290; 16,559-17,759; 17,951-24,120; 24,225-24,565; 24,730-25,152; 25,252-25,445; 25,564-30,595; 30,675-30,779; 30,838-30,995; 31,052-31,198; or 31,275-31,747 of SEQ ID NO: 2. In certain embodiments, the compound comprises a modified oligonucleotide 8 to 50 linked nucleosides in length and having a nucleobase sequence comprising at least 8 contiguous nucleobases of any of the nucleobase sequences of SEQ ID NOs: 6-1954. In certain embodiments, the compound comprises a modified oligonucleotide 12 to 50 linked nucleosides in length and having a nucleobase sequence comprising the nucleobase sequence of any one of SEQ ID NOs: 6-1954. In certain embodiments, the compound comprises a modified oligonucleotide consisting of the nucleobase sequence of any one of SEQ ID NOs: 6-1954. In certain embodiments, the compound comprises a modified oligonucleotide 16 to 50 linked nucleosides in length having a nucleobase sequence comprising any one of SEQ ID NOs: 239, 426, 1541, 1812, 1113, or 593. In certain embodiments, the compound comprises a modified oligonucleotide having a nucleobase sequence consisting of any one of SEQ ID NOs: 239, 426, 1541, 1812, 1113, or 593. In any of the foregoing embodiments, the modified oligonucleotide can be 10 to 30 linked nucleosides in length. In certain embodiments, the compound is compound number 797308, 797495, 826763, 827307, 827359, or 827392. In any of the foregoing embodiments, the compound can be single-stranded or double-stranded. In any of the foregoing embodiments, the compound can be an antisense compound or oligomeric compound.

[0124] In any of the foregoing methods or uses, the compound can be targeted to α-ENaC. In certain embodiments, the compound comprises or consists of a modified oligonucleotide, for example a modified oligonucleotide 8 to 50 linked nucleosides in length, 10 to 30 linked nucleosides in length, 12 to 30 linked nucleosides in length, or 20 linked nucleosides in length. In certain embodiments, the modified oligonucleotide is at least 80%, 85%, 90%, 95% or 100% complementary to any of the nucleobase sequences recited in SEQ ID NOs: 1, 2, or 1957. In certain embodiments, the modified oligonucleotide comprises at least one modified internucleoside linkage, at least one modified sugar, and at least one modified nucleobase. In certain such embodiments, the at least one modified internucleoside linkage is a phosphorothioate internucleoside linkage, the at least one modified sugar is a bicyclic sugar or a 2′-MOE sugar, and the at least one modified nucleobase is a 5-methylcytosine. In certain embodiments, the modified oligonucleotide comprises a gap segment consisting of linked 2′-deoxynucleosides; a 5′ wing segment consisting of linked nucleosides; and a 3′ wing segment consisting of linked nucleosides, wherein the gap segment is positioned immediately adjacent to and between the 5′ wing segment and the 3′ wing segment and wherein each terminal wing nucleoside comprises a modified sugar.

[0125] In any of the foregoing embodiments, the modified oligonucleotide is 12 to 30, 15 to 30, 15 to 25, 15 to 24, 16 to 24, 17 to 24, 18 to 24, 19 to 24, 20 to 24, 19 to 22, 20 to 22, 16 to 20, or 17 or 20 linked nucleosides in length. In certain embodiments, the modified oligonucleotide is at least 80%, 85%, 90%, 95% or 100% complementary to any of the nucleobase sequences recited in SEQ ID NOs: 1, 2, or 1957. In certain embodiments, the modified oligonucleotide comprises at least one modified intemucleoside linkage, at least one modified sugar, and at least one modified nucleobase. In certain embodiments, the at least one modified internucleoside linkage is a phosphorothioate intemucleoside linkage, the at least one modified sugar is a bicyclic sugar or a 2′-MOE sugar, and the at least one modified nucleobase is a 5-methylcytosine. In certain embodiments, the modified oligonucleotide comprises a gap segment consisting of linked 2′-deoxynucleosides; a 5′ wing segment consisting of linked nucleosides; and a 3′ wing segment consisting of linked nucleosides, wherein the gap segment is positioned immediately adjacent to and between the 5′ wing segment and the 3′ wing segment and wherein each terminal wing nucleoside comprises a modified sugar.

[0126] In any of the foregoing methods or uses, the compound comprises or consists of a modified oligonucleotide 16 to 30 linked nucleosides in length and having a nucleobase sequence comprising any one of SEQ ID NOs: 6-1954, wherein the modified oligonucleotide comprises:
[0127] a gap segment consisting of linked 2′-deoxynucleosides;
[0128] a 5′ wing segment consisting of linked nucleosides; and
[0129] a 3′ wing segment consisting of linked nucleosides;
[0130] wherein the gap segment is positioned between the 5′ wing segment and the 3′ wing segment and wherein each nucleoside of each wing segment comprises a modified sugar.

[0131] In any of the foregoing methods or uses, the compound comprises or consists of a modified oligonucleotide 16 to 30 linked nucleosides in length and having a nucleobase sequence comprising any one of SEQ ID NOs: 6-1954, wherein the modified oligonucleotide comprises: a gap segment consisting of linked 2′-deoxynucleosides;
[0132] a 5′ wing segment consisting of linked nucleosides; and a 3′ wing segment consisting of linked nucleosides;
[0133] wherein the gap segment is positioned between the 5′ wing segment and the 3′ wing segment, wherein each terminal wing nucleoside comprises a modified sugar.

[0134] In any of the foregoing methods or uses, the compound comprises or consists a modified oligonucleotide 20 linked nucleosides in length having a nucleobase sequence comprising the sequence recited in any one of SEQ ID NOs: 6-1954, wherein the modified oligonucleotide comprises
[0135] a gap segment consisting of ten linked 2′-deoxynucleosides;
[0136] a 5′ wing segment consisting of five linked nucleosides; and
[0137] a 3′ wing segment consisting of five linked nucleosides;
[0138] wherein the gap segment is positioned between the 5′ wing segment and the 3′ wing segment, wherein each nucleoside of each wing segment comprises a 2′-O-methoxyethyl sugar; wherein each internucleoside linkage is a phosphorothioate linkage and wherein each cytosine is a 5-methylcytosine. In certain embodiments, the modified oligonucleotide consists of 20-30 linked nucleosides. In certain embodiments, the modified oligonucleotide consists of 20 linked nucleosides.

[0139] In any of the foregoing methods or uses, the compound comprises or consists a modified oligonucleotide 16 to 50 linked nucleobases in length having a nucleobase sequence comprising or consisting of the sequence recited in any one of SEQ ID NOs: 6-1954, wherein the modified oligonucleotide comprises
[0140] a gap segment consisting of 10 linked 2′-deoxynucleosides;
[0141] a 5′ wing segment consisting of 3 linked nucleosides; and
[0142] a 3′ wing segment consisting of 3 linked nucleosides;
[0143] wherein the gap segment is positioned between the 5′ wing segment and the 3′ wing segment, wherein each nucleoside of each wing segment comprises a cEt sugar; wherein each internucleoside linkage is a phosphorothioate linkage and wherein each cytosine is a 5-methylcytosine. In certain embodiments, the modified oligonucleotide consists of 16-30 linked nucleosides. In certain embodiments, the modified oligonucleotide consists of 16 linked nucleosides.

[0144] In any of the foregoing methods or uses, the compound comprises or consists a modified oligonucleotide 16 to 50 linked nucleobases in length having a nucleobase sequence comprising or consisting of the sequence recited in any one of SEQ ID NOs: 239, 426, 593, 1113, 1541, or 1812, wherein the modified oligonucleotide comprises
[0145] a gap segment consisting of 10 linked 2′-deoxynucleosides;
[0146] a 5′ wing segment consisting of 3 linked nucleosides; and
[0147] a 3′ wing segment consisting of 3 linked nucleosides;
[0148] wherein the gap segment is positioned between the 5′ wing segment and the 3′ wing segment, wherein each nucleoside of each wing segment comprises a cEt sugar; wherein each internucleoside linkage is a phosphorothioate linkage and wherein each cytosine is a 5-methylcytosine. In certain embodiments, the modified oligonucleotide consists of 16-30 linked nucleosides. In certain embodiments, the modified oligonucleotide consists of 16 linked nucleosides.

[0149] In any of the foregoing methods or uses, the compound has the following chemical structure:

[chemical structure]

[0150] In any of the foregoing methods or uses, the compound can be administered via inhalation. In certain embodiments, the compound of any of the foregoing methods or uses can be administered through injection or infusion. In certain embodiments, the compound of any of the foregoing methods or uses can be administered via subcutaneous administration, intravenous administration, intramuscular administration, intraarterial administration, intraperitoneal administration, or intracranial administration, e.g. intrathecal or intracerebroventricular administration. In certain embodiments, the compound of any of the foregoing methods or uses can be administered systemically. In certain embodiments, the compound of any of the foregoing methods or uses can be administered orally.

### Certain Combinations and Combination Therapies

[0151] In certain embodiments, a first agent comprising the compound described herein is co-administered with one or more secondary agents. In certain embodiments, such second agents are designed to treat the same disease, disorder, or condition as the first agent described herein. In certain embodiments, such second agents are designed to treat a different disease, disorder, or condition as the first agent described herein. In certain embodiments, a first agent is designed to treat an undesired side effect of a second agent. In certain embodiments, second agents are co-administered with the first agent to treat an undesired effect of the first agent. In certain embodiments, such second agents are designed to treat an undesired side effect of one or more pharmaceutical compositions as described herein. In certain embodiments, second agents are co-administered with the first agent to produce a combinational effect. In certain embodiments, second agents are co-administered with the first agent to produce a synergistic effect. In certain embodiments, the co-administration of the first and second agents permits use of lower dosages than would be required to achieve a therapeutic or prophylactic effect if the agents were administered as independent therapy.

[0152] In certain embodiments, one or more compounds or compositions provided herein are co-administered with one or more secondary agents. In certain embodiments, one or more compounds or compositions provided herein and one or more secondary agents, are administered at different times. In certain embodiments, one or more compounds or compositions provided herein and one or more secondary agents, are prepared together in a single formulation. In certain embodiments, one or more compounds or compositions provided herein and one or more secondary agents, are prepared separately. In certain embodiments, a secondary agent is a bronchodilator, a corticosteroid, an antibiotic, a second compound comprising or consisting of a modified oligonucleotide, and/or a chloride channel (CFTR) modulator. In certain embodiments, a secondary agent is selected from: hypertonic saline, dornase alfa, ivacaftor, tezacaftor, and lumacaftor.

[0153] Certain embodiments are directed to the use of a compound comprising a modified oligonucleotide complementary to an α-ENaC nucleic acid transcript as described herein in combination with a secondary agent. In particular embodiments such use is in a method of treating a patient suffering from cystic fibrosis, COPD, asthma, or chronic bronchitis or in the preparation or manufacture of a medicament for treating cystic fibrosis, COPD, asthma, or chronic bronchitis. In certain embodiments, a secondary agent is a bronchodilator, a corticosteroid, an antibiotic, or a chloride channel (CFTR) modulator. In certain embodiments, a secondary agent is selected from: hypertonic saline, dornase alfa, ivacaftor, tezacaftor, and lumacaftor.

[0154] Certain embodiments are directed to the use of a compound comprising a modified oligonucleotide complementary to an α-ENaC nucleic acid transcript as described herein in combination with two or more secondary agents. In particular embodiments such use is in a method of treating a patient suffering from cystic fibrosis, COPD, asthma, or chronic bronchitis or in the preparation or manufacture of a medicament for treating cystic fibrosis, COPD, asthma, or chronic bronchitis. In certain embodiments, two or more secondary agents are selected from bronchodilators, corticosteroids, antibiotics, and chloride channel (CFTR) modulators. In certain embodiments, two or more secondary agents are selected from: hypertonic saline, dornase alfa, ivacaftor, tezacaftor, and lumacaftor.

[0155] Certain embodiments are drawn to a combination of a compound comprising a modified oligonucleotide complemetary to an α-ENaC nucleic acid transcript as described herein and a secondary agent, such as a secondary agent selected from: hypertonic saline, dornase alfa, ivacaftor, tezacaftor, and lumacaftor. In certain embodiments, such a combination of a compound comprising a modified oligonucleotide complemetary to an α-ENaC nucleic acid transcript as described herein and a secondary agent, such as a secondary agent selected from: hypertonic saline, dornase alfa, ivacaftor, tezacaftor, and lumacaftor is useful for improving or preserving spirometry or mucociliary clearance and/or treating cystic fibrosis, COPD, asthma, or chronic bronchitis.

[0156] Certain embodiments are drawn to a combination of a compound comprising a modified oligonucleotide complemetary to an α-ENaC nucleic acid transcript as described herein and two or more secondary agents, such as secondary agents selected from: hypertonic saline, dornase alfa, ivacaftor, tezacaftor, and lumacaftor. In certain embodiments, such a combination of a compound comprising a modified oligonucleotide complemetary to an α-ENaC nucleic acid transcript as described herein and two ore more secondary agents, such as secondary agents selected from: hypertonic saline, dornase alfa, ivacaftor, tezacaftor, and lumacaftor is useful for improving or preserving spirometry or mucociliary clearance and/or treating cystic fibrosis, COPD, asthma, or chronic bronchitis.

[0157] In certain embodiments the compound comprising a modified oligonucleotide complemetary to an α-ENaC nucleic acid transcript as described herein and the secondary agent are used in combination treatment by administering the two agents simultaneously, separately or sequentially. In certain embodiments the two agents are formulated as a fixed dose combination product. In other embodiments the two agents are provided to the patient as separate units which can then either be taken simultaneously or serially (sequentially).

[0158] In certain embodiments the compound comprising a modified oligonucleotide complemetary to an α-ENaC nucleic acid transcript as described herein and two or more secondary agents are used in combination treatment by administering the three or more agents simultaneously, separately or sequentially. In certain embodiments the three or more agents are formulated as a fixed dose combination product. In other embodiments the three or more agents are provided to the patient as separate units which can then either be taken simultaneously or serially (sequentially).

### Certain Compounds

[0159] In certain embodiments, compounds described herein can be antisense compounds. In certain embodiments, the antisense compound comprises or consists of an oligomeric compound. In certain embodiments, the oligomeric compound comprises or consists of a modified oligonucleotide. In certain embodiments, the modified oligonucleotide has a nucleobase sequence complementary to that of a target nucleic acid.

[0160] In certain embodiments, a compound described herein comprises or consists of a modified oligonucleotide. In certain embodiments, the modified oligonucleotide has a nucleobase sequence complementary to that of a target nucleic acid.

[0161] In certain embodiments, a compound or antisense compound is single-stranded. Such a single-stranded compound or antisense compound comprises or consists of an oligomeric compound. In certain embodiments, such an oligomeric compound comprises or consists of an oligonucleotide and optionally a conjugate group. In certain embodiments, the oligonucleotide is an antisense oligonucleotide. In certain embodiments, the oligonucleotide is modified. In certain embodiments, the oligonucleotide of a single-stranded antisense compound or oligomeric compound comprises a self-complementary nucleobase sequence.

[0162] In certain embodiments, a compound or antisense compound is double-stranded. Such double-stranded compounds comprise a first oligomeric compound comprising or consisting of a first modified oligonucleotide having a region complementary to a target nucleic acid and a second oligomeric compound comprising or consisting of a second oligonucleotide having a region complementary to the first modified oligonucleotide. In certain embodiments, the first oligonucleotide is 100% complementary to the second oligonucleotide. In certain embodiments, the first and second oligonucleotides include non-complementary, overhanging nucleosides. In certain embodiments, the first modified oligonucleotide comprises unmodified ribosyl sugar moieties as those found in RNA. In such embodiments, thymine nucleobases in the first and/or second oligonucleotide are replaced by uracil nucleobases. In certain embodiments, the first and/or second oligomeric compound comprises a conjugate group. In certain embodiments, the first modified oligonucleotide is 12-30 linked nucleosides in length and the second oligonucleotide is 12-30 linked nucleosides in length. In certain embodiments, the second oligonucleotide is modified. In certain embodiments, the first modified oligonucleotide has a nucleobase sequence comprising at least 8 contiguous nucleobases of any of SEQ ID NOs: 6-1954.

[0163] Examples of single-stranded and double-stranded compounds include but are not limited to oligonucleotides, siRNAs, microRNA targeting oligonucleotides, and single-stranded RNAi compounds, such as small hairpin RNAs (shRNAs), single-stranded siRNAs (ssRNAs), and microRNA mimics.

[0164] In certain embodiments, a compound described herein has a nucleobase sequence that, when written in the 5′ to 3′ direction, comprises the reverse complement of the target segment of a target nucleic acid to which it is targeted.

[0165] In certain embodiments, a compound described herein comprises an oligonucleotide 10 to 30 linked subunits in length. In certain embodiments, a compound described herein comprises an oligonucleotide 12 to 30 linked subunits in length. In certain embodiments, a compound described herein comprises an oligonucleotide 12 to 22 linked subunits in length. In certain embodiments, compound described herein comprises an oligonucleotide 14 to 30 linked subunits in length. In certain embodiments, compound described herein comprises an oligonucleotide 14 to 20 linked subunits in length. In certain embodiments, a compound described herein comprises an oligonucleotide 15 to 30 linked subunits in length. In certain embodiments, a compound described herein comprises an oligonucleotide 15 to 20 linked subunits in length. In certain embodiments, a compound described herein comprises an oligonucleotide 16 to 30 linked subunits in length. In certain embodiments, a compound described herein comprises an oligonucleotide 16 to 20 linked subunits in length. In certain embodiments, a compound described herein comprises an oligonucleotide 17 to 30 linked subunits in length. In certain embodiments, a compound described herein comprises an oligonucleotide 17 to 20 linked subunits in length. In certain embodiments, a compound described herein comprises an oligonucleotide 18 to 30 linked subunits in length. In certain embodiments, a compound described herein comprises an oligonucleotide 18 to 21 linked subunits in length. In certain embodiments, a compound described herein comprises an oligonucleotide 18 to 20 linked subunits in length. In certain embodiments, a compound described herein comprises an oligonucleotide 20 to 30 linked subunits in length. In other words, such oligonucleotides are 12 to 30 linked subunits, 14 to 30 linked subunits, 14 to 20 subunits, 15 to 30 subunits, 15 to 20 subunits, 16 to 30 subunits, 16 to 20 subunits, 17 to 30 subunits, 17 to 20 subunits, 18 to 30 subunits, 18 to 20 subunits, 18 to 21 subunits, 20 to 30 subunits, or 12 to 22 linked subunits in length, respectively. In certain embodiments, a compound described herein comprises an oligonucleotide 14 linked subunits in length. In certain embodiments, a compound described herein comprises an oligonucleotide 16 linked subunits in length. In certain embodiments, a compound described herein comprises an oligonucleotide 17 linked subunits in length. In certain embodiments, compound described herein comprises an oligonucleotide 18 linked subunits in length. In certain embodiments, a compound described herein comprises an oligonucleotide 19 linked subunits in length. In certain embodiments, a compound described herein comprises an oligonucleotide 20 linked subunits in length. In other embodiments, a compound described herein comprises an oligonucleotide 8 to 80, 12 to 50, 13 to 30, 13 to 50, 14 to 30, 14 to 50, 15 to 30,15 to 50, 16 to 30, 16 to 50, 17 to 30, 17 to 50, 18 to 22, 18 to 24, 18 to 30, 18 to 50, 19 to 22, 19 to 30, 19 to 50, or 20 to 30 linked subunits. In certain such embodiments, the compound described herein comprises an oligonucleotide 8, 9, 10, 11, 12, 13, 14, 15, 16, 17, 18, 19, 20, 21, 22, 23, 24, 25, 26, 27, 28, 29, 30, 31, 32, 33, 34, 35, 36, 37, 38, 39, 40, 41, 42, 43, 44, 45, 46, 47, 48, 49, or 50 linked subunits in length, or a range defined by any two of the above values. In some embodiments the linked subunits are nucleotides, nucleosides, or nucleobases.

[0166] In certain embodiments, the compound may further comprise additional features or elements, such as a conjugate group, that are attached to the oligonucleotide. In certain embodiments, such compounds are antisense compounds. In certain embodiments, such compounds are oligomeric compounds. In embodiments where a conjugate group comprises a nucleoside (i.e. a nucleoside that links the conjugate group to the oligonucleotide), the nucleoside of the conjugate group is not counted in the length of the oligonucleotide.

[0167] In certain embodiments, compounds may be shortened or truncated. For example, a single subunit may be deleted from the 5′ end (5′ truncation), or alternatively from the 3′ end (3′ truncation). A shortened or truncated compound targeted to an α-ENaC nucleic acid may have two subunits deleted from the 5′ end, or alternatively may have two subunits deleted from the 3′ end, of the compound. Alternatively, the deleted nucleosides may be dispersed throughout the compound.

[0168] When a single additional subunit is present in a lengthened compound, the additional subunit may be located at the 5′ or 3′ end of the compound. When two or more additional subunits are present, the added subunits may be adjacent to each other, for example, in a compound having two subunits added to the 5′ end (5′ addition), or alternatively to the 3′ end (3′ addition), of the compound. Alternatively, the added subunits may be dispersed throughout the compound.

[0169] It is possible to increase or decrease the length of a compound, such as an oligonucleotide, and/or introduce mismatch bases without eliminating activity (Woolf et al. Proc. Natl. Acad. Sci. USA 1992, 89:7305-7309; Gautschi et al. J Natl. Cancer Inst. March 2001, 93:463-471; Maher and Dolnick Nuc. Acid. Res. 1998, 16:3341-3358). However, seemingly small changes in oligonucleotide sequence, chemistry and motif can make large differences in one or more of the many properties required for clinical development (Seth et al. J. Med. Chem. 2009, 52, 10; Egli et al. J Am. Chem. Soc. 2011, 133, 16642).

[0170] In certain embodiments, compounds described herein are interfering RNA compounds (RNAi), which include double-stranded RNA compounds (also referred to as short-interfering RNA or siRNA) and single-stranded RNAi compounds (or ssRNA). Such compounds work at least in part through the RISC pathway to degrade and/or sequester a target nucleic acid (thus, include microRNA/microRNA-mimic compounds). As used herein, the term siRNA is meant to be equivalent to other terms used to describe nucleic acid molecules that are capable of mediating sequence specific RNAi, for example short interfering RNA (siRNA), double-stranded RNA (dsRNA), micro-RNA (miRNA), short hairpin RNA (shRNA), short interfering oligonucleotide, short interfering nucleic acid, short interfering modified oligonucleotide, chemically modified siRNA, post-transcriptional gene silencing RNA (ptgsRNA), and others. In addition, as used herein, the term “RNAi” is meant to be equivalent to other terms used to describe sequence specific RNA interference, such as post transcriptional gene silencing, translational inhibition, or epigenetics.

[0171] In certain embodiments, a compound described herein can comprise any of the oligonucleotide sequences targeted to an α-ENaC nucleic acid transcript described herein. In certain embodiments, the compound can be double-stranded. In certain embodiments, the compound comprises a first strand comprising at least an 8, 9, 10, 11, 12, 13, 14, 15, 16, 17, 18, 19, or 20 contiguous nucleobase portion of any one of SEQ ID NOs: 6-1954 and a second strand. In certain embodiments, the compound comprises a first strand comprising the nucleobase sequence of any one of SEQ ID NOs: 6-1954 and a second strand. In certain embodiments, the compound comprises ribonucleotides in which the first strand has uracil (U) in place of thymine (T) in any one of SEQ ID NOs: 6-1954. In certain embodiments, the compound comprises (i) a first strand comprising a nucleobase sequence complementary to the site on an α-ENaC nucleic acid to which any of SEQ ID NOs: 6-1954 is complementary, and (ii) a second strand. In certain embodiments, the compound comprises one or more modified nucleotides in which the 2′ position in the sugar contains a halogen (such as fluorine group; 2′-F) or contains an alkoxy group (such as a methoxy group; 2′-OMe). In certain embodiments, the compound comprises at least one 2′-F sugar modification and at least one 2′-OMe sugar modification. In certain embodiments, the at least one 2′-F sugar modification and at least one 2′-OMe sugar modification are arranged in an alternating pattern for at least 2, 3, 4, 5, 6, 7, 8, 9, 10, 11, 12, 13, 14, 15, 16, 17, 18, 19, or 20 contiguous nucleobases along a strand of the dsRNA compound. In certain embodiments, the compound comprises one or more linkages between adjacent nucleotides other than a naturally-occurring phosphodiester linkage. Examples of such linkages include phosphoramide, phosphorothioate, and phosphorodithioate linkages. The compounds may also be chemically modified nucleic acid molecules as taught in U.S. Pat. No. 6,673,661. In other embodiments, the compound contains one or two capped strands, as disclosed, for example, by WO 00/63364, filed Apr. 19, 2000.

[0172] In certain embodiments, the first strand of the compound is an siRNA guide strand and the second strand of the compound is an siRNA passenger strand. In certain embodiments, the second strand of the compound is complementary to the first strand. In certain embodiments, each strand of the compound is 16, 17, 18, 19, 20, 21, 22, or 23 linked nucleosides in length. In certain embodiments, the first or second strand of the compound can comprise a conjugate group.

[0173] In certain embodiments, a compound described herein can comprise any of the oligonucleotide sequences targeted to an α-ENaC nucleic acid described herein. In certain embodiments, the compound is single-stranded. In certain embodiments, such a compound is a single-stranded RNAi (ssRNAi) compound. In certain embodiments, the compound comprises at least an 8, 9, 10, 11, 12, 13, 14, 15, 16, 17, 18, 19, or 20 contiguous nucleobase portion of any one of SEQ ID NOs: 6-1954. In certain embodiments, the compound comprises the nucleobase sequence of any one of SEQ ID NOs: 6-1954. In certain embodiments, the compound comprises ribonucleotides in which uracil (U) is in place of thymine (T) in any one of SEQ ID NOs: 6-1954. In certain embodiments, the compound comprises a nucleobase sequence complementary to the site on α-ENaC to which any of SEQ ID NOs: 6-1954 is targeted. In certain embodiments, the compound comprises one or more modified nucleotides in which the 2′ position in the sugar contains a halogen (such as fluorine group; 2′-F) or contains an alkoxy group (such as a methoxy group; 2′-OMe). In certain embodiments, the compound comprises at least one 2′-F sugar modification and at least one 2′-OMe sugar modification. In certain embodiments, the at least one 2′-F sugar modification and at least one 2′-OMe sugar modification are arranged in an alternating pattern for at least 2, 3, 4, 5, 6, 7, 8, 9, 10, 11, 12, 13, 14, 15, 16, 17, 18, 19, or 20 contiguous nucleobases along a strand of the compound. In certain embodiments, the compound comprises one or more linkages between adjacent nucleotides other than a naturally-occurring phosphodiester linkage. Examples of such linkages include phosphoramide, phosphorothioate, and phosphorodithioate linkages. The compounds may also be chemically modified nucleic acid molecules as taught in U.S. Pat. No. 6,673,661. In other embodiments, the compound contains a capped strand, as disclosed, for example, by WO 00/63364, filed Apr. 19, 2000. In certain embodiments, the compound consists of 16, 17, 18, 19, 20, 21, 22, or 23 linked nucleosides. In certain embodiments, the compound can comprise a conjugate group.

[0174] Certain compounds described herein (e.g., modified oligonucleotides) have one or more asymmetric center and thus give rise to enantiomers, diastereomers, and other stereoisomeric configurations that may be defined, in terms of absolute stereochemistry, as (R) or (S), as α or β, such as for sugar anomers, or as (D) or (L), such as for amino acids, etc. Compounds provided herein that are drawn or described as having certain stereoisomeric configurations include only the indicated compounds. Compounds provided herein that are drawn or described with undefined stereochemistry include all such possible isomers, including their stereorandom and optically pure forms. All tautomeric forms of the compounds provided herein are included unless otherwise indicated.

[0175] The compounds described herein include variations in which one or more atoms are replaced with a non-radioactive isotope or radioactive isotope of the indicated element. For example, compounds herein that comprise hydrogen atoms encompass all possible deuterium substitutions for each of the ¹H hydrogen atoms. Isotopic substitutions encompassed by the compounds herein include but are not limited to: ²H or ³H in place of ¹H, ¹³C or ¹⁴C in place of ¹²C, ¹⁵N in place of ¹⁴N, ¹⁷O or ¹⁸O in place of ¹⁶O, and ³³S, ³⁴S, ³⁵S, or ³⁶S in place of ³²S. In certain embodiments, non-radioactive isotopic substitutions may impart new properties on the oligomeric compound that are beneficial for use as a therapeutic or research tool. In certain embodiments, radioactive isotopic substitutions may make the compound suitable for research or diagnostic purposes such as imaging.

### Certain Mechanisms

[0176] In certain embodiments, compounds described herein comprise or consist of modified oligonucleotides. In certain embodiments, compounds described herein are antisense compounds. In certain embodiments, compounds comprise oligomeric compounds. In certain embodiments, compounds described herein are capable of hybridizing to an α-ENaC target nucleic acid, resulting in at least one antisense activity. In certain embodiments, compounds described herein selectively affect one or more target nucleic acid. Such compounds comprise a nucleobase sequence that hybridizes to one or more target nucleic acid, resulting in one or more desired antisense activity and does not hybridize to one or more non-target nucleic acid or does not hybridize to one or more non-target nucleic acid in such a way that results in a significant undesired antisense activity.

[0177] In certain antisense activities, hybridization of a compound described herein to a target nucleic acid results in recruitment of a protein that cleaves the target nucleic acid. For example, certain compounds described herein result in RNase H mediated cleavage of the target nucleic acid. RNase H is a cellular endonuclease that cleaves the RNA strand of an RNA:DNA duplex. The DNA in such an RNA:DNA duplex need not be unmodified DNA. In certain embodiments, compounds described herein are sufficiently “DNA-like” to elicit RNase H activity. Further, in certain embodiments, one or more non-DNA-like nucleoside in the gap of a gapmer is tolerated.

[0178] In certain antisense activities, compounds described herein or a portion of the compound is loaded into an RNA-induced silencing complex (RISC), ultimately resulting in cleavage of the target nucleic acid. For example, certain compounds described herein result in cleavage of the target nucleic acid by Argonaute. Compounds that are loaded into RISC are RNAi compounds. RNAi compounds may be double-stranded (siRNA) or single-stranded (ssRNA).

[0179] Antisense activities may be observed directly or indirectly. In certain embodiments, observation or detection of an antisense activity involves observation or detection of a change in an amount of a target nucleic acid or protein encoded by such target nucleic acid, a change in the ratio of splice variants of a nucleic acid or protein, and/or a phenotypic change in a cell or animal.

### Target Nucleic Acids, Target Regions and Nucleotide Sequences

[0180] In certain embodiments, compounds described herein comprise or consist of an oligonucleotide comprising a region that is complementary to a target nucleic acid. In certain embodiments, the target nucleic acid is an endogenous RNA molecule. In certain embodiments, the target nucleic acid encodes a protein. In certain such embodiments, the target nucleic acid is selected from: an mRNA and a pre-mRNA, including intronic, exonic and untranslated regions. In certain embodiments, the target RNA is an mRNA. In certain embodiments, the target nucleic acid is a pre-mRNA. In certain embodiments, a pre-mRNA and corresponding mRNA are both target nucleic acids of a single compound. In certain such embodiments, the target region is entirely within an intron of a target pre-mRNA. In certain embodiments, the target region spans an intron/exon junction. In certain embodiments, the target region is at least 50% within an intron. Target nucleic acid sequences that encode α-ENaC include, without limitation, the following: RefSEQ No. NM_001038.5; the complement of NC_000012.12 truncated from nucleosides 6343001 to 6380000; and NG_011945.1 (SEQ ID Nos: 1, 2, and 1957, respectively).

### Hybridization

[0181] In some embodiments, hybridization occurs between a compound disclosed herein and an α-ENaC nucleic acid. The most common mechanism of hybridization involves hydrogen bonding (e.g., Watson-Crick, Hoogsteen or reversed Hoogsteen hydrogen bonding) between complementary nucleobases of the nucleic acid molecules.

[0182] Hybridization can occur under varying conditions. Hybridization conditions are sequence-dependent and are determined by the nature and composition of the nucleic acid molecules to be hybridized.

[0183] Methods of determining whether a sequence is specifically hybridizable to a target nucleic acid are well known in the art. In certain embodiments, the compounds provided herein are specifically hybridizable with an α-ENaC nucleic acid.

### Complementarity

[0184] In certain embodiments, compounds described herein comprise or consist of modified oligonucleotides. In certain embodiments, compounds described herein are antisense compounds. In certain embodiments, compounds comprise oligomeric compounds. In certain embodiments, oligonucleotides complementary to an α-ENaC nucleic acid comprise nucleobase that are non-complementary with the α-ENaC nucleic acid, yet may be tolerated provided that the compound remains able to specifically hybridize to a target nucleic acid. Moreover, a compound may hybridize over one or more segments of an α-ENaC nucleic acid such that intervening or adjacent segments are not involved in the hybridization event (e.g., a loop structure, mismatch or hairpin structure).

[0185] In certain embodiments, the compounds provided herein, or a specified portion thereof, are, are at least, or are up to 70%, 80%, 85%, 86%, 87%, 88%, 89%, 90%, 91%, 92%, 93%, 94%, 95%, 96%, 97%, 98%, 99%, or 100% complementary to an α-ENaC nucleic acid, a target region, target segment, or specified portion thereof. In certain embodiments, the compounds provided herein, or a specified portion thereof, are 70% to 75%, 75% to 80%, 80% to 85%, 85% to 90%, 90% to 95%, 95% to 100%, or any number in between these ranges, complementary to an α-ENaC nucleic acid, a target region, target segment, or specified portion thereof. Percent complementarity of a compound with a target nucleic acid can be determined using routine methods.

[0186] For example, a compound in which 18 of 20 nucleobases of the compound are complementary to a target region, and would therefore specifically hybridize, would represent 90 percent complementarity. In this example, the remaining non-complementary nucleobases may be clustered or interspersed with complementary nucleobases and need not be contiguous to each other or to complementary nucleobases. As such, a compound which is 18 nucleobases in length having four non-complementary nucleobases which are flanked by two regions of complete complementarity with the target nucleic acid would have 77.8% overall complementarity with the target nucleic acid. Percent complementarity of a compound with a region of a target nucleic acid can be determined routinely using BLAST programs (basic local alignment search tools) and PowerBLAST programs known in the art (Altschul et al., J Mol. Biol., 1990, 215, 403 410; Zhang and Madden, Genome Res., 1997, 7, 649 656). Percent homology, sequence identity or complementarity, can be determined by, for example, the Gap program (Wisconsin Sequence Analysis Package, Version 8 for Unix, Genetics Computer Group, University Research Park, Madison Wis.), using default settings, which uses the algorithm of Smith and Waterman (Adv. Appl. Math., 1981, 2, 482 489).

[0187] In certain embodiments, compounds described herein, or specified portions thereof, are fully complementary (i.e. 100% complementary) to a target nucleic acid, or specified portion thereof. For example, a compound may be 100% complementary to an α-ENaC nucleic acid, or a target region, or a target segment or target sequence thereof. As used herein, “fully complementary” means each nucleobase of a compound is complementary to the corresponding nucleobase of a target nucleic acid. For example, a 20 nucleobase compound is fully complementary to a target sequence that is 400 nucleobases long, so long as there is a corresponding 20 nucleobase portion of the target nucleic acid that is fully complementary to the compound. Fully complementary can also be used in reference to a specified portion of the first and/or the second nucleic acid. For example, a 20 nucleobase portion of a 30 nucleobase compound can be “fully complementary” to a target sequence that is 400 nucleobases long. The 20 nucleobase portion of the 30 nucleobase compound is fully complementary to the target sequence if the target sequence has a corresponding 20 nucleobase portion wherein each nucleobase is complementary to the 20 nucleobase portion of the compound. At the same time, the entire 30 nucleobase compound may or may not be fully complementary to the target sequence, depending on whether the remaining 10 nucleobases of the compound are also complementary to the target sequence.

[0188] In certain embodiments, compounds described herein comprise one or more mismatched nucleobases relative to the target nucleic acid. In certain such embodiments, antisense activity against the target is reduced by such mismatch, but activity against a non-target is reduced by a greater amount. Thus, in certain such embodiments selectivity of the compound is improved. In certain embodiments, the mismatch is specifically positioned within an oligonucleotide having a gapmer motif. In certain such embodiments, the mismatch is at position 1, 2, 3, 4, 5, 6, 7, or 8 from the 5′-end of the gap segment. In certain such embodiments, the mismatch is at position 9, 8, 7, 6, 5, 4, 3, 2, 1 from the 3′-end of the gap segment. In certain such embodiments, the mismatch is at position 1, 2, 3, or 4 from the 5′-end of the wing segment. In certain such embodiments, the mismatch is at position 4, 3, 2, or 1 from the 3′-end of the wing segment. In certain embodiments, the mismatch is specifically positioned within an oligonucleotide not having a gapmer motif. In certain such embodiments, the mismatch is at position 1, 2, 3, 4, 5, 6, 7, 8, 9, 10, 11, or 12 from the 5′-end of the oligonucleotide. In certain such embodiments, the mismatch is at position, 2, 3, 4, 5, 6, 7, 8, 9, 10, 11, or 12 from the 3′-end of the oligonucleotide.

[0189] The location of a non-complementary nucleobase may be at the 5′ end or 3′ end of the compound. Alternatively, the non-complementary nucleobase or nucleobases may be at an internal position of the compound. When two or more non-complementary nucleobases are present, they may be contiguous (i.e. linked) or non-contiguous. In one embodiment, a non-complementary nucleobase is located in the wing segment of a gapmer oligonucleotide.

[0190] In certain embodiments, compounds described herein that are, or are up to 11, 12, 13, 14, 15, 16, 17, 18, 19, or 20 nucleobases in length comprise no more than 4, no more than 3, no more than 2, or no more than 1 non-complementary nucleobase(s) relative to a target nucleic acid, such as an α-ENaC nucleic acid, or specified portion thereof.

[0191] In certain embodiments, compounds described herein that are, or are up to 11, 12, 13, 14, 15, 16, 17, 18, 19, 20, 21, 22, 23, 24, 25, 26, 27, 28, 29, or 30 nucleobases in length comprise no more than 6, no more than 5, no more than 4, no more than 3, no more than 2, or no more than 1 non-complementary nucleobase(s) relative to a target nucleic acid, such as an α-ENaC nucleic acid, or specified portion thereof.

[0192] In certain embodiments, compounds described herein also include those which are complementary to a portion (a defined number of contiguous nucleobases within a region or segment) of a target nucleic acid. In certain embodiments, the compounds, are complementary to at least an 8 nucleobase portion of a target segment. In certain embodiments, the compounds are complementary to at least a 9 nucleobase portion of a target segment. In certain embodiments, the compounds are complementary to at least a 10 nucleobase portion of a target segment. In certain embodiments, the compounds are complementary to at least an 11 nucleobase portion of a target segment. In certain embodiments, the compounds are complementary to at least a 12 nucleobase portion of a target segment. In certain embodiments, the compounds are complementary to at least a 13 nucleobase portion of a target segment. In certain embodiments, the compounds are complementary to at least a 14 nucleobase portion of a target segment. In certain embodiments, the compounds are complementary to at least a 15 nucleobase portion of a target segment. In certain embodiments, the compounds are complementary to at least a 16 nucleobase portion of a target segment. Also contemplated are compounds that are complementary to at least a 9, 10, 11, 12, 13, 14, 15, 16, 17, 18, 19, 20, or more nucleobase portion of a target segment, or a range defined by any two of these values.

### Certain Compounds

[0193] In certain embodiments, compounds described herein comprise or consist of oligonucleotides consisting of linked nucleosides. Oligonucleotides may be unmodified oligonucleotides (RNA or DNA) or may be modified oligonucleotides. Modified oligonucleotides comprise at least one modification relative to unmodified RNA or DNA (i.e., comprise at least one modified nucleoside (comprising a modified sugar moiety and/or a modified nucleobase) and/or at least one modified internucleoside linkage).

### I. Modifications

### A. Modified Nucleosides

[0194] Modified nucleosides comprise a modified sugar moiety or a modified nucleobase or both a modified sugar moiety and a modified nucleobase.

### 1. Modified Sugar Moieties

[0195] In certain embodiments, sugar moieties are non-bicyclic modified sugar moieties. In certain embodiments, modified sugar moieties are bicyclic or tricyclic sugar moieties. In certain embodiments, modified sugar moieties are sugar surrogates. Such sugar surrogates may comprise one or more substitutions corresponding to those of other types of modified sugar moieties.

[0196] In certain embodiments, modified sugar moieties are non-bicyclic modified furanosyl sugar moieties comprising one or more acyclic substituent, including but not limited to substituents at the 2′, 4′, and/or 5′ positions. In certain embodiments, the furanosyl sugar moiety is a ribosyl sugar moiety. In certain embodiments one or more acyclic substituent of non-bicyclic modified sugar moieties is branched. Examples of 2′-substituent groups suitable for non-bicyclic modified sugar moieties include but are not limited to: 2′-F, 2′-OCH₃ (“OMe” or “O-methyl”), and 2′-O(CH₂)₂OCH₃ (“MOE”). In certain embodiments, 2′-substituent groups are selected from among: halo, allyl, amino, azido, SH, CN, OCN, CF₃, OCF₃, O—C₁-C₁₀ alkoxy, O—C₁-C₁₀ substituted alkoxy, O—C₁-C₁₀ alkyl, O—C₁-C₁₀ substituted alkyl, S-alkyl, N(Rₘ)-alkyl, O-alkenyl, S-alkenyl, N(Rₘ)-alkenyl, O-alkynyl, S-alkynyl, N(Rₘ)-alkynyl, O-alkylenyl-O-alkyl, alkynyl, alkaryl, aralkyl, O-alkaryl, O-aralkyl, O(CH₂)₂SCH₃, O(CH₂)₂ON(Rₘ)(Rₙ) or OCH₂C(═O)—N(Rₘ)(Rₙ), where each Rₘ and Rₙ is, independently, H, an amino protecting group, or substituted or unsubstituted C₁-C₁₀ alkyl, and the 2′-substituent groups described in Cook et al., U.S. Pat. No. 6,531,584; Cook et al., U.S. Pat. No. 5,859,221; and Cook et al., U.S. Pat. No. 6,005,087. Certain embodiments of these 2′-substituent groups can be further substituted with one or more substituent groups independently selected from among: hydroxyl, amino, alkoxy, carboxy, benzyl, phenyl, nitro (NO₂), thiol, thioalkoxy, thioalkyl, halogen, alkyl, aryl, alkenyl and alkynyl. Examples of 4′-substituent groups suitable for non-bicyclic modified sugar moieties include but are not limited to alkoxy (e.g., methoxy), alkyl, and those described in Manoharan et al., WO 2015/106128. Examples of 5′-substituent groups suitable for non-bicyclic modified sugar moieties include but are not limited to: 5′-methyl (R or S), 5′-vinyl, and 5′-methoxy. In certain embodiments, non-bicyclic modified sugars comprise more than one non-bridging sugar substituent, for example, 2′-F-5′-methyl sugar moieties and the modified sugar moieties and modified nucleosides described in Migawa et al., WO 2008/101157 and Rajeev et al., US2013/0203836.).

[0197] In certain embodiments, a 2′-substituted nucleoside or 2′-non-bicyclic modified nucleoside comprises a sugar moiety comprising a non-bridging 2′-substituent group selected from: F, NH₂, N₃, OCF₃, OCH₃, O(CH₂)₃NH₂, CH₂CH═CH₂, OCH₂CH═CH₂, OCH₂CH₂OCH₃, O(CH₂)₂SCH₃, O(CH₂)₂ON(Rₘ)(Rₙ), O(CH₂)₂O(CH₂)₂N(CH₃)₂, and N-substituted acetamide (OCH₂C(═O)—N(Rₘ)(Rₙ)), where each Rₘ and Rₙ is, independently, H, an amino protecting group, or substituted or unsubstituted C₁-C₁₀ alkyl.

[0198] In certain embodiments, a 2′-substituted nucleoside or 2′-non-bicyclic modified nucleoside comprises a sugar moiety comprising a non-bridging 2′-substituent group selected from: F, OCF₃, OCH₃, OCH₂CH₂OCH₃, O(CH₂)₂SCH₃, O(CH₂)₂ON(CH₃)₂, O(CH₂)₂O(CH₂)₂N(CH₃)₂, and OCH₂C(═O)—N(H)CH₃ (“NMA”).

[0199] In certain embodiments, a 2′-substituted nucleoside or 2′-non-bicyclic modified nucleoside comprises a sugar moiety comprising a non-bridging 2′-substituent group selected from: F, OCH₃, and OCH₂CH₂OCH₃.

[0200] Nucleosides comprising modified sugar moieties, such as non-bicyclic modified sugar moieties, may be referred to by the position(s) of the substitution(s) on the sugar moiety of the nucleoside. For example, nucleosides comprising 2′-substituted or 2-modified sugar moieties are referred to as 2′-substituted nucleosides or 2-modified nucleosides.

[0201] Certain modified sugar moieties comprise a bridging sugar substituent that forms a second ring resulting in a bicyclic sugar moiety. In certain such embodiments, the bicyclic sugar moiety comprises a bridge between the 4′ and the 2′ furanose ring atoms. In certain such embodiments, the furanose ring is a ribose ring. Examples of such 4′ to 2′ bridging sugar substituents include but are not limited to: 4′-CH₂-2′, 4′-(CH₂)₂-2′, 4′-(CH₂)₃-2′, 4′-CH₂—O-2′ (“LNA”), 4′-CH₂—S-2′, 4′-(CH₂)₂-O-2′ (“ENA”), 4′-CH(CH₃)—O-2′ (referred to as “constrained ethyl” or “cEt” when in the S configuration), 4′-CH₂—O—CH₂-2′, 4′-CH₂—N(R)-2′, 4′-CH(CH₂OCH₃)—O-2′ (“constrained MOE” or “cMOE”) and analogs thereof (see, e.g., Seth et al., U.S. Pat. No. 7,399,845, Bhat et al., U.S. Pat. No. 7,569,686, Swayze et al., U.S. Pat. No. 7,741,457, and Swayze et al., U.S. Pat. No. 8,022,193), 4′-C(CH₃)(CH₃)—O-2′ and analogs thereof (see, e.g., Seth et al., U.S. Pat. No. 8,278,283), 4′-CH₂—N(OCH₃)-2′ and analogs thereof (see, e.g., Prakash et al., U.S. Pat. No. 8,278,425), 4′-CH₂—O—N(CH₃)-2′ (see, e.g., Allerson et al., U.S. Pat. No. 7,696,345 and Allerson et al., U.S. Pat. No. 8,124,745), 4′-CH₂—C(H)(CH₃)-2′ (see, e.g., Zhou, et al., J. Org. Chem., 2009, 74, 118-134), 4′-CH₂—C(═CH₂)-2′ and analogs thereof (see e.g., Seth et al., U.S. Pat. No. 8,278,426), 4′-C(RₐR_{b})—N(R)—O-2′, 4′-C(RₐR_{b})—O—N(R)-2′, 4′-CH₂—O—N(R)-2′, and 4′-CH₂—N(R)—O-2′, wherein each R, Rₐ, and R_{b} is, independently, H, a protecting group, or C₁-C₁₂ alkyl (see, e.g. Imanishi et al., U.S. Pat. No. 7,427,672).

[0202] In certain embodiments, such 4′ to 2′ bridges independently comprise from 1 to 4 linked groups independently selected from: —[C(Rₐ)(R_{b})]ₙ—O—, —[C(Rₐ)(R_{b})]ₙ—O—, —C(Rₐ)═C(R_{b})—, —C(Rₐ)═N—, —C(═NRₐ)—, —C(═O)—, —C(═S)—, —O—, —Si(Rₐ)₂-, —S(═O)ₓ—, and —N(Rₐ)—;
[0203] wherein:
[0204] x is 0, 1, or 2;
[0205] n is 1, 2, 3, or 4;
[0206] each Rₐ and R_{b} is, independently, H, a protecting group, hydroxyl, C₁-C₁₂ alkyl, substituted C₁-C₁₂ alkyl, C₂-C₁₂ alkenyl, substituted C₂-C₁₂ alkenyl, C₂-C₁₂ alkynyl, substituted C₂-C₁₂ alkynyl, C₅-C₂₀ aryl, substituted C₅-C₂₀ aryl, heterocycle radical, substituted heterocycle radical, heteroaryl, substituted heteroaryl, C₅-C₇ alicyclic radical, substituted C₅-C₇ alicyclic radical, halogen, OJ₁, NJ₁J₂, SJ₁, N₃, COOJ₁, acyl (C(═O)—H), substituted acyl, CN, sulfonyl (S(═O)₂-J₁), or sulfoxyl (S(═O)-J₁); and
[0207] each J₁ and J₂ is, independently, H, C₁-C₁₂ alkyl, substituted C₁-C₁₂ alkyl, C₂-C₁₂ alkenyl, substituted C₂-C₁₂ alkenyl, C₂-C₁₂ alkynyl, substituted C₂-C₁₂ alkynyl, C₅-C₂₀ aryl, substituted C₅-C₂₀ aryl, acyl (C(═O)—H), substituted acyl, a heterocycle radical, a substituted heterocycle radical, C₁-C₁₂ aminoalkyl, substituted C₁-C₁₂ aminoalkyl, or a protecting group.

[0208] Additional bicyclic sugar moieties are known in the art, see, for example: Freier et al., Nucleic Acids Research, 1997, 25(22), 4429-4443, Albaek et al., J. Org. Chem., 2006, 71, 7731-7740, Singh et al., Chem. Commun., 1998, 4, 455-456; Koshkin et al., Tetrahedron, 1998, 54, 3607-3630; Kumar et al., Bioorg. Med. Chem. Lett., 1998, 8, 2219-2222; Singh et al., J. Org. Chem., 1998, 63, 10035-10039; Srivastava et al., J. Am. Chem. Soc., 20017, 129, 8362-8379; Elayadi et al., Wengel et al., U.S. Pat. No. 7,053,207; Imanishi et al., U.S. Pat. No. 6,268,490; Imanishi et al. U.S. Pat. No. 6,770,748; Imanishi et al., U.S. RE44,779; Wengel et al., U.S. Pat. No. 6,794,499; Wengel et al., U.S. Pat. No. 6,670,461; Wengel et al., U.S. Pat. No. 7,034,133; Wengel et al., U.S. Pat. No. 8,080,644; Wengel et al., U.S. Pat. No. 8,034,909; Wengel et al., U.S. Pat. No. 8,153,365; Wengel et al., U.S. Pat. No. 7,572,582; and Ramasamy et al., U.S. Pat. No. 6,525,191; Torsten et al., WO 2004/106356; Wengel et al., WO 1999/014226; Seth et al., WO 2007/134181; Seth et al., U.S. Pat. No. 7,547,684; Seth et al., U.S. Pat. No. 7,666,854; Seth et al., U.S. Pat. No. 8,088,746; Seth et al., U.S. Pat. No. 7,750,131; Seth et al., U.S. Pat. No. 8,030,467; Seth et al., U.S. Pat. No. 8,268,980; Seth et al., U.S. Pat. No. 8,546,556; Seth et al., U.S. Pat. No. 8,530,640; Migawa et al., U.S. Pat. No. 9,012,421; Seth et al., U.S. Pat. No. 8,501,805; and U.S. Patent Publication Nos. Allerson et al., US2008/0039618 and Migawa et al., US2015/0191727.

[0209] In certain embodiments, bicyclic sugar moieties and nucleosides incorporating such bicyclic sugar moieties are further defined by isomeric configuration. For example, an LNA nucleoside (described herein) may be in the α-L configuration or in the β-D configuration.

[chemical structure]

α-L-methyleneoxy (4′-CH₂—O-2′) or α-L-LNA bicyclic nucleosides have been incorporated into antisense oligonucleotides that showed antisense activity (Frieden et al., Nucleic Acids Research, 2003, 21, 6365-6372). Herein, general descriptions of bicyclic nucleosides include both isomeric configurations. When the positions of specific bicyclic nucleosides (e.g., LNA) are identified in exemplified embodiments herein, they are in the β-D configuration, unless otherwise specified.

[0210] In certain embodiments, modified sugar moieties comprise one or more non-bridging sugar substituent and one or more bridging sugar substituent (e.g., 5′-substituted and 4′-2′ bridged sugars).

[0211] In certain embodiments, modified sugar moieties are sugar surrogates. In certain such embodiments, the oxygen atom of the sugar moiety is replaced, e.g., with a sulfur, carbon or nitrogen atom. In certain such embodiments, such modified sugar moieties also comprise bridging and/or non-bridging substituents as described herein. For example, certain sugar surrogates comprise a 4′-sulfur atom and a substitution at the 2′-position (see, e.g., Bhat et al., U.S. Pat. No. 7,875,733 and Bhat et al., U.S. Pat. No. 7,939,677) and/or the 5′ position.

[0212] In certain embodiments, sugar surrogates comprise rings having other than 5 atoms. For example, in certain embodiments, a sugar surrogate comprises a six-membered tetrahydropyran (“THP”). Such tetrahydropyrans may be further modified or substituted. Nucleosides comprising such modified tetrahydropyrans include but are not limited to hexitol nucleic acid (“HNA”), anitol nucleic acid (“ANA”), manitol nucleic acid (“MNA”) (see, e.g., Leumann, CJ. Bioorg. & Med. Chem. 2002, 10, 841-854), fluoro HNA:

[chemical structure]

(“F-HNA”, see e.g. Swayze et al., U.S. Pat. No. 8,088,904; Swayze et al., U.S. Pat. No. 8,440,803; Swayze et al., U.S. Pat. No. 8,796,437; and Swayze et al., U.S. Pat. No. 9,005,906; F-HNA can also be referred to as a F-THP or 3-fluoro tetrahydropyran), and nucleosides comprising additional modified THP compounds having the formula:

[chemical structure]

wherein, independently, for each of said modified THP nucleoside:
[0213] Bx is a nucleobase moiety;
[0214] T₃ and T₄ are each, independently, an intemucleoside linking group linking the modified THP nucleoside to the remainder of an oligonucleotide or one of T₃ and T₄ is an internucleoside linking group linking the modified THP nucleoside to the remainder of an oligonucleotide and the other of T₃ and T₄ is H, a hydroxyl protecting group, a linked conjugate group, or a 5′ or 3-terminal group; q₁, q₂, q₃, q₄, q₅, q₆ and q are each, independently, H, C₁-C₆ alkyl, substituted C₁-C₆ alkyl, C₂-C₆ alkenyl, substituted C₂-C₆ alkenyl, C₂-C₆ alkynyl, or substituted C₂-C₆ alkynyl; and
[0215] each of R₁ and R₂ is independently selected from among: hydrogen, halogen, substituted or unsubstituted alkoxy, NJ₁J₂, SJ₁, N₃, OC(═X)J₁, OC(═X)NJ₁J₂, NJ₃C(═X)NJ₁J₂, and CN, wherein X is O, S or NJ₁, and each J₁, J₂, and J₃ is, independently, H or C₁-C₆ alkyl.

[0216] In certain embodiments, modified THP nucleosides are provided wherein q₁, q₂, q₃, q₄, q₅, q₆ and g₇ are each H. In certain embodiments, at least one of q₁, q₂, q₃, q₄, q₅, q₆ and q₇ is other than H. In certain embodiments, at least one of q₁, q₂, q₃, q₄, q₅, q₆ and q is methyl. In certain embodiments, modified THP nucleosides are provided wherein one of R₁ and R₂ is F. In certain embodiments, R₁ is F and R₂ is H, in certain embodiments, R₁ is methoxy and R₂ is H, and in certain embodiments, R₁ is methoxyethoxy and R₂ is H.

[0217] In certain embodiments, sugar surrogates comprise rings having more than 5 atoms and more than one heteroatom. For example, nucleosides comprising morpholino sugar moieties and their use in oligonucleotides have been reported (see, e.g., Braasch et al., Biochemistry, 2002, 41, 4503-4510 and Summerton et al., U.S. Pat. No. 5,698,685; Summerton et al., U.S. Pat. No. 5,166,315; Summerton et al., U.S. Pat. No. 5,185,444; and Summerton et al., U.S. Pat. No. 5,034,506). As used here, the term “morpholino” means a sugar surrogate having the following structure:

[chemical structure]

In certain embodiments, morpholinos may be modified, for example by adding or altering various substituent groups from the above morpholino structure. Such sugar surrogates are referred to herein as “modified morpholinos.”

[0218] In certain embodiments, sugar surrogates comprise acyclic moieties. Examples of nucleosides and oligonucleotides comprising such acyclic sugar surrogates include but are not limited to: peptide nucleic acid (“PNA”), acyclic butyl nucleic acid (see, e.g., Kumar et al., Org. Biomol. Chem., 2013, 11, 5853-5865), and nucleosides and oligonucleotides described in Manoharan et al., WO2011/133876.

[0219] Many other bicyclic and tricyclic sugar and sugar surrogate ring systems are known in the art that can be used in modified nucleosides).

### 2. Modified Nucleobases

[0220] In certain embodiments, modified nucleobases are selected from: 5-substituted pyrimidines, 6-azapyrimidines, alkyl or alkynyl substituted pyrimidines, alkyl substituted purines, and N-2, N-6 and 0-6 substituted purines. In certain embodiments, modified nucleobases are selected from: 2-aminopropyladenine, 5-hydroxymethyl cytosine, xanthine, hypoxanthine, 2-aminoadenine, 6-N-methylguanine, 6-N-methyladenine, 2-propyladenine, 2-thiouracil, 2-thiothymine and 2-thiocytosine, 5-propynyl (—C═C—CH₃) uracil, 5-propynylcytosine, 6-azouracil, 6-azocytosine, 6-azothymine, 5-ribosyluracil (pseudouracil), 4-thiouracil, 8-halo, 8-amino, 8-thiol, 8-thioalkyl, 8-hydroxyl, 8-aza and other 8-substituted purines, 5-halo, particularly 5-bromo, 5-trifluoromethyl, 5-halouracil, and 5-halocytosine, 7-methylguanine, 7-methyladenine, 2-F-adenine, 2-aminoadenine, 7-deazaguanine, 7-deazaadenine, 3-deazaguanine, 3-deazaadenine, 6-N-benzoyladenine, 2-N-isobutyrylguanine, 4-N-benzoylcytosine, 4-N-benzoyluracil, 5-methyl 4-N-benzoylcytosine, 5-methyl 4-N-benzoyluracil, universal bases, hydrophobic bases, promiscuous bases, size-expanded bases, and fluorinated bases. Further modified nucleobases include tricyclic pyrimidines, such as 1,3-diazaphenoxazine-2-one, 1,3-diazaphenothiazine-2-one and 9-(2-aminoethoxy)-1,3-diazaphenoxazine-2-one (G-clamp). Modified nucleobases may also include those in which the purine or pyrimidine base is replaced with other heterocycles, for example 7-deaza-adenine, 7-deazaguanosine, 2-aminopyridine and 2-pyridone. Further nucleobases include those disclosed in Merigan et al., U.S. Pat. No. 3,687,808, those disclosed in The Concise Encyclopedia Of Polymer Science And Engineering, Kroschwitz, J. I., Ed., John Wiley & Sons, 1990, 858-859; Englisch et al., Angewandte Chemie, International Edition, 1991, 30, 613; Sanghvi, Y. S., Chapter 15, Antisense Research and Applications, Crooke, S. T. and Lebleu, B., Eds., CRC Press, 1993, 273-288; and those disclosed in Chapters 6 and 15, Antisense Drug Technology, Crooke S. T., Ed., CRC Press, 2008, 163-166 and 442-443.

[0221] Publications that teach the preparation of certain of the above noted modified nucleobases as well as other modified nucleobases include without limitation, Manohara et al., US2003/0158403; Manoharan et al., US2003/0175906; Dinh et al., U.S. Pat. No. 4,845,205; Spielvogel et al., U.S. Pat. No. 5,130,302; Rogers et al., U.S. Pat. No. 5,134,066; Bischofberger et al., U.S. Pat. No. 5,175,273; Urdea et al., U.S. Pat. No. 5,367,066; Benner et al., U.S. Pat. No. 5,432,272; Matteucci et al., U.S. Pat. No. 5,434,257; Gmeiner et al., U.S. Pat. No. 5,457,187; Cook et al., U.S. Pat. No. 5,459,255; Froehler et al., U.S. Pat. No. 5,484,908; Matteucci et al., U.S. Pat. No. 5,502,177; Hawkins et al., U.S. Pat. No. 5,525,711; Haralambidis et al., U.S. Pat. No. 5,552,540; Cook et al., U.S. Pat. No. 5,587,469; Froehler et al., U.S. Pat. No. 5,594,121; Switzer et al., U.S. Pat. No. 5,596,091; Cook et al., U.S. Pat. No. 5,614,617; Froehler et al., U.S. Pat. No. 5,645,985; Cook et al., U.S. Pat. No. 5,681,941; Cook et al., U.S. Pat. No. 5,811,534; Cook et al., U.S. Pat. No. 5,750,692; Cook et al., U.S. Pat. No. 5,948,903; Cook et al., U.S. Pat. No. 5,587,470; Cook et al., U.S. Pat. No. 5,457,191; Matteucci et al., U.S. Pat. No. 5,763,588; Froehler et al., U.S. Pat. No. 5,830,653; Cook et al., U.S. Pat. No. 5,808,027; Cook et al., 6,166,199; and Matteucci et al., U.S. Pat. No. 6,005,096.

[0222] In certain embodiments, compounds comprise or consist of a modified oligonucleotide complementary to an α-ENaC nucleic acid comprising one or more modified nucleobases. In certain embodiments, the modified nucleobase is 5-methylcytosine. In certain embodiments, each cytosine is a 5-methylcytosine.

### B. Modified Internucleoside Linkages

[0223] In certain embodiments, compounds described herein having one or more modified internucleoside linkages are selected over compounds having only phosphodiester internucleoside linkages because of desirable properties such as, for example, enhanced cellular uptake, enhanced affinity for target nucleic acids, and increased stability in the presence of nucleases.

[0224] In certain embodiments, compounds comprise or consist of a modified oligonucleotide complementary to an α-ENaC nucleic acid comprising one or more modified internucleoside linkages. In certain embodiments, the modified internucleoside linkages are phosphorothioate linkages. In certain embodiments, each internucleoside linkage of an antisense compound is a phosphorothioate internucleoside linkage.

[0225] In certain embodiments, nucleosides of modified oligonucleotides may be linked together using any internucleoside linkage. The two main classes of internucleoside linking groups are defined by the presence or absence of a phosphorus atom. Representative phosphorus-containing internucleoside linkages include but are not limited to phosphates, which contain a phosphodiester bond (“P═O”) (also referred to as unmodified or naturally occurring linkages), phosphotriesters, methylphosphonates, phosphoramidates, and phosphorothioates (“P═S”), and phosphorodithioates (“HS—P═S”). Representative non-phosphorus containing internucleoside linking groups include but are not limited to methylenemethylimino (—CH₂—N(CH₃)—O—CH₂—), thiodiester, thionocarbamate (—O—C(═O)(NH)—S—); siloxane (—O—SiH₂—O—); and N,N′-dimethylhydrazine (—CH₂—N(CH₃)—N(CH₃)—). Modified internucleoside linkages, compared to naturally occurring phosphate linkages, can be used to alter, typically increase, nuclease resistance of the oligonucleotide. Methods of preparation of phosphorous-containing and non-phosphorous-containing internucleoside linkages are well known to those skilled in the art.

[0226] Representative internucleoside linkages having a chiral center include but are not limited to alkylphosphonates and phosphorothioates. Modified oligonucleotides comprising internucleoside linkages having a chiral center can be prepared as populations of modified oligonucleotides comprising stereorandom internucleoside linkages, or as populations of modified oligonucleotides comprising phosphorothioate linkages in particular stereochemical configurations. In certain embodiments, populations of modified oligonucleotides comprise phosphorothioate internucleoside linkages wherein all of the phosphorothioate internucleoside linkages are stereorandom. Such modified oligonucleotides can be generated using synthetic methods that result in random selection of the stereochemical configuration of each phosphorothioate linkage. Nonetheless, as is well understood by those of skill in the art, each individual phosphorothioate of each individual oligonucleotide molecule has a defined stereoconfiguration. In certain embodiments, populations of modified oligonucleotides are enriched for modified oligonucleotides comprising one or more particular phosphorothioate internucleoside linkages in a particular, independently selected stereochemical configuration. In certain embodiments, the particular configuration of the particular phosphorothioate linkage is present in at least 65% of the molecules in the population. In certain embodiments, the particular configuration of the particular phosphorothioate linkage is present in at least 70% of the molecules in the population. In certain embodiments, the particular configuration of the particular phosphorothioate linkage is present in at least 80% of the molecules in the population. In certain embodiments, the particular configuration of the particular phosphorothioate linkage is present in at least 90% of the molecules in the population. In certain embodiments, the particular configuration of the particular phosphorothioate linkage is present in at least 99% of the molecules in the population. Such chirally enriched populations of modified oligonucleotides can be generated using synthetic methods known in the art, e.g., methods described in Oka et al., JACS 125, 8307 (2003), Wan et al. Nuc. Acid. Res. 42, 13456 (2014), and WO 2017/015555. In certain embodiments, a population of modified oligonucleotides is enriched for modified oligonucleotides having at least one indicated phosphorothioate in the (Sp) configuration. In certain embodiments, a population of modified oligonucleotides is enriched for modified oligonucleotides having at least one phosphorothioate in the (Rp) configuration. In certain embodiments, modified oligonucleotides comprising (Rp) and/or (Sp) phosphorothioates comprise one or more of the following formulas, respectively, wherein “B” indicates a nucleobase:

[chemical structure]

Unless otherwise indicated, chiral internucleoside linkages of modified oligonucleotides described herein can be stereorandom or in a particular stereochemical configuration.

[0227] Neutral internucleoside linkages include, without limitation, phosphotriesters, methylphosphonates, MMI (3′-CH₂—N(CH₃)—O-5′), amide-3 (3′-CH₂—C(═O)—N(H)-5′), amide-4 (3′-CH₂—N(H)—C(═O)-5′), formacetal (3′-O—CH₂—O-5′), methoxypropyl, and thioformacetal (3′-S—CH₂—O-5′). Further neutral internucleoside linkages include nonionic linkages comprising siloxane (dialkylsiloxane), carboxylate ester, carboxamide, sulfide, sulfonate ester and amides (See for example: Carbohydrate Modifications in Antisense Research; Y. S. Sanghvi and P. D. Cook, Eds., ACS Symposium Series 580; Chapters 3 and 4, 40-65). Further neutral internucleoside linkages include nonionic linkages comprising mixed N, O, S and CH2 component parts.

### II. Certain Motifs

[0228] In certain embodiments, compounds described herein comprise or consist of oligonucleotides. Oligonucleotides can have a motif, e.g. a pattern of unmodified and/or modified sugar moieties, nucleobases, and/or internucleoside linkages. In certain embodiments, modified oligonucleotides comprise one or more modified nucleoside comprising a modified sugar. In certain embodiments, modified oligonucleotides comprise one or more modified nucleosides comprising a modified nucleobase. In certain embodiments, modified oligonucleotides comprise one or more modified internucleoside linkage. In such embodiments, the modified, unmodified, and differently modified sugar moieties, nucleobases, and/or internucleoside linkages of a modified oligonucleotide define a pattern or motif. In certain embodiments, the patterns or motifs of sugar moieties, nucleobases, and internucleoside linkages are each independent of one another. Thus, a modified oligonucleotide may be described by its sugar motif, nucleobase motif and/or internucleoside linkage motif (as used herein, nucleobase motif describes the modifications to the nucleobases independent of the sequence of nucleobases).

### A. Certain Sugar Motifs

[0229] In certain embodiments, compounds described herein comprise or consist of oligonucleotides. In certain embodiments, oligonucleotides comprise one or more type of modified sugar and/or unmodified sugar moiety arranged along the oligonucleotide or region thereof in a defined pattern or sugar motif. In certain instances, such sugar motifs include but are not limited to any of the sugar modifications discussed herein.

[0230] In certain embodiments, modified oligonucleotides comprise or consist of a region having a gapmer motif, which comprises two external segments or “wings” and a central or internal segment or “gap.” The three segments of a gapmer motif (the 5′-wing, the gap, and the 3′-wing) form a contiguous sequence of nucleosides wherein at least some of the sugar moieties of the nucleosides of each of the wings differ from at least some of the sugar moieties of the nucleosides of the gap. Specifically, at least the sugar moieties of the nucleosides of each wing that are immediately adjacent to the gap (the 3′-terminal wing nucleoside of the 5′-wing and the 5′-terminal wing nucleoside of the 3′-wing) differ from the sugar moiety of the adjacent gap nucleosides. In certain embodiments, the sugar moieties within the gap are the same as one another. In certain embodiments, the gap includes one or more nucleoside having a sugar moiety that differs from the sugar moiety of one or more other nucleosides of the gap. In certain embodiments, the sugar motifs of the two wings are the same as one another (symmetric gapmer). In certain embodiments, the sugar motif of the 5′-wing differs from the sugar motif of the 3′-wing (asymmetric gapmer).

[0231] In certain embodiments, the wings of a gapmer each comprise 1-5 nucleosides. In certain embodiments, the wings of a gapmer each comprise 2-5 nucleosides. In certain embodiments, the wings of a gapmer each comprise 3-5 nucleosides. In certain embodiments, the nucleosides of the wings of a gapmer are all modified nucleosides. In certain such embodiments, the sugar moieties of the wings of a gapmer are all modified sugar moieties.

[0232] In certain embodiments, the gap of a gapmer comprises 7-12 nucleosides. In certain embodiments, the gap of a gapmer comprises 7-10 nucleosides. In certain embodiments, the gap of a gapmer comprises 8-10 nucleosides. In certain embodiments, the gap of a gapmer comprises 10 nucleosides. In certain embodiment, each nucleoside of the gap of a gapmer is a 2′-deoxynucleoside.

[0233] In certain embodiments, the gapmer is a deoxy gapmer. In such embodiments, the nucleosides on the gap side of each wing/gap junction are 2′-deoxynucleosides and the terminal wing nucleosides immediately adjacent to the gap comprise modified sugar moieties. In certain such embodiments, each nucleoside of the gap is a 2′-deoxynucleoside. In certain such embodiments, each nucleoside of each wing comprises a modified sugar moiety.

[0234] In certain embodiments, a modified oligonucleotide has a fully modified sugar motif wherein each nucleoside of the modified oligonucleotide comprises a modified sugar moiety. In certain embodiments, modified oligonucleotides comprise or consist of a region having a fully modified sugar motif wherein each nucleoside of the region comprises a modified sugar moiety. In certain embodiments, modified oligonucleotides comprise or consist of a region having a fully modified sugar motif, wherein each nucleoside within the fully modified region comprises the same modified sugar moiety, referred to herein as a uniformly modified sugar motif. In certain embodiments, a fully modified oligonucleotide is a uniformly modified oligonucleotide. In certain embodiments, each nucleoside of a uniformly modified oligonucleotide comprises the same 2′-modification.

[0235] In certain embodiments, a modified oligonucleotide can comprise a sugar motif described in Swayze et al., US2010/0197762; Freier et al., US2014/0107330; Freier et al., US2015/0184153; and Seth et al., US2015/0267195.

### B. Certain Nucleobase Motifs

[0236] In certain embodiments, compounds described herein comprise or consist of oligonucleotides. In certain embodiments, oligonucleotides comprise modified and/or unmodified nucleobases arranged along the oligonucleotide or region thereof in a defined pattern or motif. In certain embodiments, each nucleobase is modified. In certain embodiments, none of the nucleobases are modified. In certain embodiments, each purine or each pyrimidine is modified. In certain embodiments, each adenine is modified. In certain embodiments, each guanine is modified. In certain embodiments, each thymine is modified. In certain embodiments, each uracil is modified. In certain embodiments, each cytosine is modified. In certain embodiments, some or all of the cytosine nucleobases in a modified oligonucleotide are 5-methylcytosines.

[0237] In certain embodiments, modified oligonucleotides comprise a block of modified nucleobases. In certain such embodiments, the block is at the 3′-end of the oligonucleotide. In certain embodiments the block is within 3 nucleosides of the 3′-end of the oligonucleotide. In certain embodiments, the block is at the 5′-end of the oligonucleotide. In certain embodiments the block is within 3 nucleosides of the 5′-end of the oligonucleotide.

[0238] In certain embodiments, oligonucleotides having a gapmer motif comprise a nucleoside comprising a modified nucleobase. In certain such embodiments, one nucleoside comprising a modified nucleobase is in the gap of an oligonucleotide having a gapmer motif. In certain such embodiments, the sugar moiety of said nucleoside is a 2′-deoxyribosyl moiety. In certain embodiments, the modified nucleobase is selected from: a 2-thiopyrimidine and a 5-propynepyrimidine.

### C. Certain Internucleoside Linkage Motifs

[0239] In certain embodiments, compounds described herein comprise or consist of oligonucleotides. In certain embodiments, oligonucleotides comprise modified and/or unmodified internucleoside linkages arranged along the oligonucleotide or region thereof in a defined pattern or motif. In certain embodiments, each internucleoside linking group is a phosphodiester internucleoside linkage (P═O). In certain embodiments, each internucleoside linking group of a modified oligonucleotide is a phosphorothioate internucleoside linkage (P═S). In certain embodiments, each internucleoside linkage of a modified oligonucleotide is independently selected from a phosphorothioate internucleoside linkage and phosphodiester internucleoside linkage. In certain embodiments, each phosphorothioate internucleoside linkage is independently selected from a stereorandom phosphorothioate, a (Sp) phosphorothioate, and a (Rp) phosphorothioate. In certain embodiments, the sugar motif of a modified oligonucleotide is a gapmer and the internucleoside linkages within the gap are all modified. In certain such embodiments, some or all of the internucleoside linkages in the wings are unmodified phosphate linkages. In certain embodiments, the terminal internucleoside linkages are modified. In certain embodiments, the sugar motif of a modified oligonucleotide is a gapmer, and the internucleoside linkage motif comprises at least one phosphodiester internucleoside linkage in at least one wing, wherein the at least one phosphodiester linkage is not a terminal internucleoside linkage, and the remaining internucleoside linkages are phosphorothioate internucleoside linkages. In certain such embodiments, all of the phosphorothioate linkages are stereorandom. In certain embodiments, all of the phosphorothioate linkages in the wings are (Sp) phosphorothioates, and the gap comprises at least one Sp, Sp, Rp motif. In certain embodiments, populations of modified oligonucleotides are enriched for modified oligonucleotides comprising such internucleoside linkage motifs.

[0240] In certain embodiments, oligonucleotides comprise a region having an alternating internucleoside linkage motif. In certain embodiments, oligonucleotides comprise a region of uniformly modified internucleoside linkages. In certain such embodiments, the internucleoside linkages are phosphorothioate internucleoside linkages. In certain embodiments, all of the internucleoside linkages of the oligonucleotide are phosphorothioate internucleoside linkages. In certain embodiments, each internucleoside linkage of the oligonucleotide is selected from phosphodiester or phophate and phosphorothioate. In certain embodiments, each internucleoside linkage of the oligonucleotide is selected from phosphodiester or phosphate and phosphorothioate and at least one internucleoside linkage is phosphorothioate.

[0241] In certain embodiments, the oligonucleotide comprises at least 6 phosphorothioate internucleoside linkages. In certain embodiments, the oligonucleotide comprises at least 8 phosphorothioate internucleoside linkages. In certain embodiments, the oligonucleotide comprises at least 10 phosphorothioate internucleoside linkages. In certain embodiments, the oligonucleotide comprises at least one block of at least 6 consecutive phosphorothioate internucleoside linkages. In certain embodiments, the oligonucleotide comprises at least one block of at least 8 consecutive phosphorothioate internucleoside linkages. In certain embodiments, the oligonucleotide comprises at least one block of at least 10 consecutive phosphorothioate internucleoside linkages. In certain embodiments, the oligonucleotide comprises at least block of at least one 12 consecutive phosphorothioate internucleoside linkages. In certain such embodiments, at least one such block is located at the 3′ end of the oligonucleotide. In certain such embodiments, at least one such block is located within 3 nucleosides of the 3′ end of the oligonucleotide.

[0242] In certain embodiments, oligonucleotides comprise one or more methylphosponate linkages. In certain embodiments, oligonucleotides having a gapmer nucleoside motif comprise a linkage motif comprising all phosphorothioate linkages except for one or two methylphosponate linkages. In certain embodiments, one methylphosponate linkage is in the gap of an oligonucleotide having a gapmer sugar motif.

[0243] In certain embodiments, it is desirable to arrange the number of phosphorothioate internucleoside linkages and phosphodiester internucleoside linkages to maintain nuclease resistance. In certain embodiments, it is desirable to arrange the number and position of phosphorothioate internucleoside linkages and the number and position of phosphodiester internucleoside linkages to maintain nuclease resistance. In certain embodiments, the number of phosphorothioate internucleoside linkages may be decreased and the number of phosphodiester internucleoside linkages may be increased. In certain embodiments, the number of phosphorothioate internucleoside linkages may be decreased and the number of phosphodiester internucleoside linkages may be increased while still maintaining nuclease resistance. In certain embodiments it is desirable to decrease the number of phosphorothioate internucleoside linkages while retaining nuclease resistance. In certain embodiments it is desirable to increase the number of phosphodiester internucleoside linkages while retaining nuclease resistance.

### III. Certain Modified Oligonucleotides

[0244] In certain embodiments, compounds described herein comprise or consist of modified oligonucleotides. In certain embodiments, the above modifications (sugar, nucleobase, internucleoside linkage) are incorporated into a modified oligonucleotide. In certain embodiments, modified oligonucleotides are characterized by their modifications, motifs, and overall lengths. In certain embodiments, such parameters are each independent of one another. Thus, unless otherwise indicated, each internucleoside linkage of an oligonucleotide having a gapmer sugar motif may be modified or unmodified and may or may not follow the gapmer modification pattern of the sugar modifications. Likewise, such gapmer oligonucleotides may comprise one or more modified nucleobase independent of the gapmer pattern of the sugar modifications. Furthermore, in certain instances, an oligonucleotide is described by an overall length or range and by lengths or length ranges of two or more regions (e.g., a region of nucleosides having specified sugar modifications), in such circumstances it may be possible to select numbers for each range that result in an oligonucleotide having an overall length falling outside the specified range. In such circumstances, both elements must be satisfied. For example, in certain embodiments, a modified oligonucleotide consists of 15-20 linked nucleosides and has a sugar motif consisting of three regions or segments, A, B, and C, wherein region or segment A consists of 2-6 linked nucleosides having a specified sugar motif, region or segment B consists of 6-10 linked nucleosides having a specified sugar motif, and region or segment C consists of 2-6 linked nucleosides having a specified sugar motif. Such embodiments do not include modified oligonucleotides where A and C each consist of 6 linked nucleosides and B consists of 10 linked nucleosides (even though those numbers of nucleosides are permitted within the requirements for A, B, and C) because the overall length of such oligonucleotide is 22, which exceeds the upper limit of 20 for the overall length of the modified oligonucleotide. Unless otherwise indicated, all modifications are independent of nucleobase sequence except that the modified nucleobase 5-methylcytosine is necessarily a “C” in an oligonucleotide sequence.

[0245] In certain embodiments, oligonucleotides consist of X to Y linked nucleosides, where X represents the fewest number of nucleosides in the range and Y represents the largest number nucleosides in the range. In certain such embodiments, X and Y are each independently selected from 8, 9, 10, 11, 12, 13, 14, 15, 16, 17, 18, 19, 20, 21, 22, 23, 24, 25, 26, 27, 28, 29, 30, 31, 32, 33, 34, 35, 36, 37, 38, 39, 40, 41, 42, 43, 44, 45, 46, 47, 48, 49, and 50; provided that X≤Y. For example, in certain embodiments, oligonucleotides consist of 12 to 13, 12 to 14, 12 to 15, 12 to 16, 12 to 17, 12 to 18, 12 to 19, 12 to 20, 12 to 21, 12 to 22, 12 to 23, 12 to 24, 12 to 25, 12 to 26, 12 to 27, 12 to 28, 12 to 29, 12 to 30,13 to 14,13 to 15,13 to 16,13 to 17,13 to 18, 13 to 19, 13 to 20, 13 to 21, 13 to 22, 13 to 23, 13 to 24, 13 to 25, 13 to 26, 13 to 27, 13 to 28, 13 to 29, 13 to 30, 14 to 15, 14 to 16, 14 to 17, 14 to 18, 14 to 19, 14 to 20, 14 to 21, 14 to 22, 14 to 23, 14 to 24, 14 to 25, 14 to 26, 14 to 27, 14 to 28, 14 to 29, 14 to 30,15 to 16,15 to 17,15 to 18,15 to 19, 15 to 20, 15 to 21, 15 to 22, 15 to 23, 15 to 24, 15 to 25, 15 to 26, 15 to 27, 15 to 28, 15 to 29, 15 to 30, 16 to 17, 16 to 18, 16 to 19, 16 to 20, 16 to 21, 16 to 22, 16 to 23, 16 to 24, 16 to 25, 16 to 26, 16 to 27, 16 to 28, 16 to 29, 16 to 30, 17 to 18, 17 to 19, 17 to 20, 17 to 21, 17 to 22, 17 to 23, 17 to 24, 17 to 25, 17 to 26, 17 to 27, 17 to 28, 17 to 29, 17 to 30, 18 to 19, 18 to 20, 18 to 21, 18 to 22, 18 to 23, 18 to 24, 18 to 25, 18 to 26, 18 to 27, 18 to 28, 18 to 29, 18 to 30, 19 to 20, 19 to 21, 19 to 22, 19 to 23, 19 to 24, 19 to 25, 19 to 26, 19 to 29, 19 to 28, 19 to 29, 19 to 30, 20 to 21, 20 to 22, 20 to 23, 20 to 24, 20 to 25, 20 to 26, 20 to 27, 20 to 28, 20 to 29, 20 to 30, 21 to 22, 21 to 23, 21 to 24, 21 to 25, 21 to 26, 21 to 27, 21 to 28, 21 to 29, 21 to 30, 22 to 23, 22 to 24, 22 to 25, 22 to 26, 22 to 27, 22 to 28, 22 to 29, 22 to 30, 23 to 24, 23 to 25, 23 to 26, 23 to 27, 23 to 28, 23 to 29, 23 to 30, 24 to 25, 24 to 26, 24 to 27, 24 to 28, 24 to 29, 24 to 30, 25 to 26, 25 to 27, 25 to 28, 25 to 29, 25 to 30, 26 to 27, 26 to 28, 26 to 29, 26 to 30, 27 to 28, 27 to 29, 27 to 30, 28 to 29, 28 to 30, or 29 to 30 linked nucleosides.

[0246] In certain embodiments oligonucleotides have a nucleobase sequence that is complementary to a second oligonucleotide or an identified reference nucleic acid, such as a target nucleic acid. In certain embodiments, a region of an oligonucleotide has a nucleobase sequence that is complementary to a second oligonucleotide or an identified reference nucleic acid, such as a target nucleic acid. In certain embodiments, the nucleobase sequence of a region or entire length of an oligonucleotide is at least 70%, at least 80%, at least 90%, at least 95%, or 100% complementary to the second oligonucleotide or nucleic acid, such as a target nucleic acid.

### IV. Certain Conjugated Compounds

[0247] In certain embodiments, the compounds described herein comprise or consist of an oligonucleotide (modified or unmodified) and optionally one or more conjugate groups and/or terminal groups. Conjugate groups consist of one or more conjugate moiety and a conjugate linker that links the conjugate moiety to the oligonucleotide. Conjugate groups may be attached to either or both ends of an oligonucleotide and/or at any internal position. In certain embodiments, conjugate groups are attached to the 2′-position of a nucleoside of a modified oligonucleotide. In certain embodiments, conjugate groups that are attached to either or both ends of an oligonucleotide are terminal groups. In certain such embodiments, conjugate groups or terminal groups are attached at the 3′ and/or 5′-end of oligonucleotides. In certain such embodiments, conjugate groups (or terminal groups) are attached at the 3′-end of oligonucleotides. In certain embodiments, conjugate groups are attached near the 3′-end of oligonucleotides. In certain embodiments, conjugate groups (or terminal groups) are attached at the 5′-end of oligonucleotides. In certain embodiments, conjugate groups are attached near the 5′-end of oligonucleotides.

[0248] Examples of terminal groups include but are not limited to conjugate groups, capping groups, phosphate moieties, protecting groups, modified or unmodified nucleosides, and two or more nucleosides that are independently modified or unmodified.

### A. Certain Conjugate Groups

[0249] In certain embodiments, oligonucleotides are covalently attached to one or more conjugate groups. In certain embodiments, conjugate groups modify one or more properties of the attached oligonucleotide, including but not limited to pharmacodynamics, pharmacokinetics, stability, binding, absorption, tissue distribution, cellular distribution, cellular uptake, charge and clearance. In certain embodiments, conjugate groups impart a new property on the attached oligonucleotide, e.g., fluorophores or reporter groups that enable detection of the oligonucleotide.

[0250] Certain conjugate groups and conjugate moieties have been described previously, for example: cholesterol moiety (Letsinger et al., Proc. Natl. Acad. Sci. USA, 1989, 86, 6553-6556), cholic acid (Manoharan et al., Bioorg. Med. Chem. Lett., 1994, 4, 1053-1060), a thioether, e.g., hexyl-S-tritylthiol (Manoharan et al., Ann. N.Y. Acad. Sci., 1992, 660, 306-309; Manoharan et al., Bioorg. Med. Chem. Lett., 1993, 3, 2765-2770), a thiocholesterol (Oberhauser et al., Nucl. Acids Res., 1992, 20, 533-538), an aliphatic chain, e.g., do-decan-diol or undecyl residues (Saison-Behmoaras et al., EM1BO J., 1991, 10, 1111-1118; Kabanov et al., FEBS Lett., 1990, 259, 327-330; Svinarchuk et al., Biochimie, 1993, 75, 49-54), a phospholipid, e.g., di-hexadecyl-rac-glycerol or triethyl-ammonium 1,2-di-O-hexadecyl-rac-glycero-3-H-phosphonate (Manoharan et al., Tetrahedron Lett., 1995, 36, 3651-3654; Shea et al., Nucl. Acids Res., 1990, 18, 3777-3783), a polyamine or a polyethylene glycol chain (Manoharan et al., Nucleosides & Nucleotides, 1995, 14, 969-973), or adamantane acetic, a palmityl moiety (Mishra et al., Biochim. Biophys. Acta, 1995, 1264, 229-237), an octadecylamine or hexylamino-carbonyl-oxycholesterol moiety (Crooke et al., J Pharmacol. Exp. Ther., 1996, i, 923-937), a tocopherol group (Nishina et al., Molecular Therapy Nucleic Acids, 2015, 4, e220; doi:10.1038/mtna. 2014.72 and Nishina et al., Molecular Therapy, 2008, 16, 734-740), or a GalNAc cluster (e.g., WO2014/179620).

### 1. Conjugate Moieties

[0251] Conjugate moieties include, without limitation, intercalators, reporter molecules, polyamines, polyamides, peptides, carbohydrates (e.g., GalNAc), vitamin moieties, polyethylene glycols, thioethers, polyethers, cholesterols, thiocholesterols, cholic acid moieties, folate, lipids, phospholipids, biotin, phenazine, phenanthridine, anthraquinone, adamantane, acridine, fluoresceins, rhodamines, coumarins, fluorophores, and dyes.

[0252] In certain embodiments, a conjugate moiety comprises an active drug substance, for example, aspirin, warfarin, phenylbutazone, ibuprofen, suprofen, fen-bufen, ketoprofen, (S)-(+)-pranoprofen, carprofen, dansylsarcosine, 2,3,5-triiodobenzoic acid, fingolimod, flufenamic acid, folinic acid, a benzothiadiazide, chlorothiazide, a diazepine, indo-methicin, a barbiturate, a cephalosporin, a sulfa drug, an antidiabetic, an antibacterial or an antibiotic.

2. Conjugate linkers

[0253] Conjugate moieties are attached to oligonucleotides through conjugate linkers. In certain compounds, a conjugate group is a single chemical bond (i.e. conjugate moiety is attached to an oligonucleotide via a conjugate linker through a single bond). In certain embodiments, the conjugate linker comprises a chain structure, such as a hydrocarbyl chain, or an oligomer of repeating units such as ethylene glycol, nucleosides, or amino acid units.

[0254] In certain embodiments, a conjugate linker comprises one or more groups selected from alkyl, amino, oxo, amide, disulfide, polyethylene glycol, ether, thioether, and hydroxylamino. In certain such embodiments, the conjugate linker comprises groups selected from alkyl, amino, oxo, amide and ether groups. In certain embodiments, the conjugate linker comprises groups selected from alkyl and amide groups. In certain embodiments, the conjugate linker comprises groups selected from alkyl and ether groups. In certain embodiments, the conjugate linker comprises at least one phosphorus moiety. In certain embodiments, the conjugate linker comprises at least one phosphate group. In certain embodiments, the conjugate linker includes at least one neutral linking group.

[0255] In certain embodiments, conjugate linkers, including the conjugate linkers described above, are bifunctional linking moieties, e.g., those known in the art to be useful for attaching conjugate groups to parent compounds, such as the oligonucleotides provided herein. In general, a bifunctional linking moiety comprises at least two functional groups. One of the functional groups is selected to bind to a particular site on a compound and the other is selected to bind to a conjugate group. Examples of functional groups used in a bifunctional linking moiety include but are not limited to electrophiles for reacting with nucleophilic groups and nucleophiles for reacting with electrophilic groups. In certain embodiments, bifunctional linking moieties comprise one or more groups selected from amino, hydroxyl, carboxylic acid, thiol, alkyl, alkenyl, and alkynyl.

[0256] Examples of conjugate linkers include but are not limited to pyrrolidine, 8-amino-3,6-dioxaoctanoic acid (ADO), succinimidyl 4-(N-maleimidomethyl) cyclohexane-1-carboxylate (SMCC) and 6-aminohexanoic acid (AHEX or AHA). Other conjugate linkers include but are not limited to substituted or unsubstituted C₁-C₁₀ alkyl, substituted or unsubstituted C₂-C₁₀ alkenyl or substituted or unsubstituted C₂-C₁₀ alkynyl, wherein a nonlimiting list of preferred substituent groups includes hydroxyl, amino, alkoxy, carboxy, benzyl, phenyl, nitro, thiol, thioalkoxy, halogen, alkyl, aryl, alkenyl and alkynyl.

[0257] In certain embodiments, conjugate linkers comprise 1-10 linker-nucleosides. In certain embodiments, such linker-nucleosides are modified nucleosides. In certain embodiments such linker-nucleosides comprise a modified sugar moiety. In certain embodiments, linker-nucleosides are unmodified. In certain embodiments, linker-nucleosides comprise an optionally protected heterocyclic base selected from a purine, substituted purine, pyrimidine or substituted pyrimidine. In certain embodiments, a cleavable moiety is a nucleoside selected from uracil, thymine, cytosine, 4-N-benzoylcytosine, 5-methylcytosine, 4-N-benzoyl-5-methylcytosine, adenine, 6-N-benzoyladenine, guanine and 2-N-isobutyrylguanine. It is typically desirable for linker-nucleosides to be cleaved from the compound after it reaches a target tissue. Accordingly, linker-nucleosides are typically linked to one another and to the remainder of the compound through cleavable bonds. In certain embodiments, such cleavable bonds are phosphodiester bonds.

[0258] Herein, linker-nucleosides are not considered to be part of the oligonucleotide. Accordingly, in embodiments in which a compound comprises an oligonucleotide consisting of a specified number or range of linked nucleosides and/or a specified percent complementarity to a reference nucleic acid and the compound also comprises a conjugate group comprising a conjugate linker comprising linker-nucleosides, those linker-nucleosides are not counted toward the length of the oligonucleotide and are not used in determining the percent complementarity of the oligonucleotide for the reference nucleic acid. For example, a compound may comprise (1) a modified oligonucleotide consisting of 8-30 nucleosides and (2) a conjugate group comprising 1-10 linker-nucleosides that are contiguous with the nucleosides of the modified oligonucleotide. The total number of contiguous linked nucleosides in such a compound is more than 30. Alternatively, an compound may comprise a modified oligonucleotide consisting of 8-30 nucleosides and no conjugate group. The total number of contiguous linked nucleosides in such a compound is no more than 30. Unless otherwise indicated conjugate linkers comprise no more than 10 linker-nucleosides. In certain embodiments, conjugate linkers comprise no more than 5 linker-nucleosides. In certain embodiments, conjugate linkers comprise no more than 3 linker-nucleosides. In certain embodiments, conjugate linkers comprise no more than 2 linker-nucleosides. In certain embodiments, conjugate linkers comprise no more than 1 linker-nucleoside.

[0259] In certain embodiments, it is desirable for a conjugate group to be cleaved from the oligonucleotide. For example, in certain circumstances compounds comprising a particular conjugate moiety are better taken up by a particular cell type, but once the compound has been taken up, it is desirable that the conjugate group be cleaved to release the unconjugated or parent oligonucleotide. Thus, certain conjugate may comprise one or more cleavable moieties, typically within the conjugate linker. In certain embodiments, a cleavable moiety is a cleavable bond. In certain embodiments, a cleavable moiety is a group of atoms comprising at least one cleavable bond. In certain embodiments, a cleavable moiety comprises a group of atoms having one, two, three, four, or more than four cleavable bonds. In certain embodiments, a cleavable moiety is selectively cleaved inside a cell or subcellular compartment, such as a lysosome. In certain embodiments, a cleavable moiety is selectively cleaved by endogenous enzymes, such as nucleases.

[0260] In certain embodiments, a cleavable bond is selected from among: an amide, an ester, an ether, one or both esters of a phosphodiester, a phosphate ester, a carbamate, or a disulfide. In certain embodiments, a cleavable bond is one or both of the esters of a phosphodiester. In certain embodiments, a cleavable moiety comprises a phosphate or phosphodiester. In certain embodiments, the cleavable moiety is a phosphate linkage between an oligonucleotide and a conjugate moiety or conjugate group.

[0261] In certain embodiments, a cleavable moiety comprises or consists of one or more linker-nucleosides. In certain such embodiments, one or more linker-nucleosides are linked to one another and/or to the remainder of the compound through cleavable bonds. In certain embodiments, such cleavable bonds are unmodified phosphodiester bonds. In certain embodiments, a cleavable moiety is 2′-deoxy nucleoside that is attached to either the 3′ or 5′-terminal nucleoside of an oligonucleotide by a phosphate internucleoside linkage and covalently attached to the remainder of the conjugate linker or conjugate moiety by a phosphate or phosphorothioate linkage. In certain such embodiments, the cleavable moiety is 2′-deoxyadenosine.

### 3. Certain Cell-Targeting Conjugate Moieties

[0262] In certain embodiments, a conjugate group comprises a cell-targeting conjugate moiety. In certain embodiments, a conjugate group has the general formula:

[chemical structure]

[0263] wherein n is from 1 to about 3, m is 0 when n is 1, m is 1 when n is 2 or greater, j is 1 or 0, and k is 1 or 0.

[0264] In certain embodiments, n is 1, j is 1 and k is 0. In certain embodiments, n is 1, j is 0 and k is 1. In certain embodiments, n is 1, j is 1 and k is 1. In certain embodiments, n is 2, j is 1 and k is 0. In certain embodiments, n is 2, j is 0 and k is 1. In certain embodiments, n is 2, j is 1 and k is 1. In certain embodiments, n is 3, j is 1 and k is 0. In certain embodiments, n is 3, j is 0 and k is 1. In certain embodiments, n is 3, j is 1 and k is 1.

[0265] In certain embodiments, conjugate groups comprise cell-targeting moieties that have at least one tethered ligand. In certain embodiments, cell-targeting moieties comprise two tethered ligands covalently attached to a branching group. In certain embodiments, cell-targeting moieties comprise three tethered ligands covalently attached to a branching group.

[0266] In certain embodiments, the cell-targeting moiety comprises a branching group comprising one or more groups selected from alkyl, amino, oxo, amide, disulfide, polyethylene glycol, ether, thioether and hydroxylamino groups. In certain embodiments, the branching group comprises a branched aliphatic group comprising groups selected from alkyl, amino, oxo, amide, disulfide, polyethylene glycol, ether, thioether and hydroxylamino groups. In certain such embodiments, the branched aliphatic group comprises groups selected from alkyl, amino, oxo, amide and ether groups. In certain such embodiments, the branched aliphatic group comprises groups selected from alkyl, amino and ether groups. In certain such embodiments, the branched aliphatic group comprises groups selected from alkyl and ether groups. In certain embodiments, the branching group comprises a mono or polycyclic ring system.

[0267] In certain embodiments, each tether of a cell-targeting moiety comprises one or more groups selected from alkyl, substituted alkyl, ether, thioether, disulfide, amino, oxo, amide, phosphodiester, and polyethylene glycol, in any combination. In certain embodiments, each tether is a linear aliphatic group comprising one or more groups selected from alkyl, ether, thioether, disulfide, amino, oxo, amide, and polyethylene glycol, in any combination. In certain embodiments, each tether is a linear aliphatic group comprising one or more groups selected from alkyl, phosphodiester, ether, amino, oxo, and amide, in any combination. In certain embodiments, each tether is a linear aliphatic group comprising one or more groups selected from alkyl, ether, amino, oxo, and amid, in any combination. In certain embodiments, each tether is a linear aliphatic group comprising one or more groups selected from alkyl, amino, and oxo, in any combination. In certain embodiments, each tether is a linear aliphatic group comprising one or more groups selected from alkyl and oxo, in any combination. In certain embodiments, each tether is a linear aliphatic group comprising one or more groups selected from alkyl and phosphodiester, in any combination. In certain embodiments, each tether comprises at least one phosphorus linking group or neutral linking group. In certain embodiments, each tether comprises a chain from about 6 to about 20 atoms in length. In certain embodiments, each tether comprises a chain from about 10 to about 18 atoms in length. In certain embodiments, each tether comprises about 10 atoms in chain length.

[0268] In certain embodiments, each ligand of a cell-targeting moiety has an affinity for at least one type of receptor on a target cell. In certain embodiments, each ligand has an affinity for at least one type of receptor on the surface of a mammalian lung cell.

[0269] In certain embodiments, each ligand of a cell-targeting moiety is a carbohydrate, carbohydrate derivative, modified carbohydrate, polysaccharide, modified polysaccharide, or polysaccharide derivative. In certain such embodiments, the conjugate group comprises a carbohydrate cluster (see, e.g., Maier et al., “Synthesis of Antisense Oligonucleotides Conjugated to a Multivalent Carbohydrate Cluster for Cellular Targeting,” Bioconjugate Chemistry, 2003, 14, 18-29, or Rensen et al., “Design and Synthesis of Novel N-Acetylgalactosamine-Terminated Glycolipids for Targeting of Lipoproteins to the Hepatic Asiaglycoprotein Receptor,” J. Med. Chem. 2004, 47, 5798-5808, which are incorporated herein by reference in their entirety). In certain such embodiments, each ligand is an amino sugar or a thio sugar. For example, amino sugars may be selected from any number of compounds known in the art, such as sialic acid, α-D-galactosamine, β-muramic acid, 2-deoxy-2-methylamino-L-glucopyranose, 4,6-dideoxy-4-formamido-2,3-di-O-methyl-D-mannopyranose, 2-deoxy-2-sulfoamino-D-glucopyranose and N-sulfo-D-glucosamine, and N-glycoloyl-α-neuraminic acid. For example, thio sugars may be selected from 5-Thio-β-D-glucopyranose, methyl 2,3,4-tri-O-acetyl-1-thio-6-O-trityl-α-D-glucopyranoside, 4-thio-β-D-galactopyranose, and ethyl 3,4,6,7-tetra-O-acetyl-2-deoxy-1,5-dithio-α-D-gluco-heptopyranoside.

[0270] In certain embodiments compounds described herein comprise a conjugate group found in any of the following references: Lee, Carbohydr Res, 1978, 67, 509-514; Connolly et al., J Biol Chem, 1982, 257, 939-945; Pavia et al., Int J Pep Protein Res, 1983, 22, 539-548; Lee et al., Biochem, 1984, 23, 4255-4261; Lee et al., Glycoconjugate J, 1987, 4, 317-328; Toyokuni et al., Tetrahedron Lett, 1990, 31, 2673-2676; Biessen et al., J Med Chem, 1995, 38, 1538-1546; Valentijn et al., Tetrahedron, 1997, 53, 759-770; Kim et al., Tetrahedron Lett, 1997, 38, 3487-3490; Lee et al., Bioconjug Chem, 1997, 8, 762-765; Kato et al., Glycobiol, 2001, 11, 821-829; Rensen et al., J Biol Chem, 2001, 276, 37577-37584; Lee et al., Methods Enzymol, 2003, 362, 38-43; Westerlind et al., Glycoconj J, 2004, 21, 227-241; Lee et al., Bioorg Med Chem Lett, 2006, 16(19), 5132-5135; Maierhofer et al., Bioorg Med Chem, 2007, 15, 7661-7676; Khorev et al., Bioorg Med Chem, 2008, 16, 5216-5231; Lee et al., Bioorg Med Chem, 2011, 19, 2494-2500; Korilova et al., Analyt Biochem, 2012, 425, 43-46; Pujol et al., Angew Chemie Int Ed Engl, 2012, 51, 7445-7448; Biessen et al., J Med Chem, 1995, 38, 1846-1852; Sliedregt et al., J Med Chem, 1999, 42, 609-618; Rensen et al., J Med Chem, 2004, 47, 5798-5808; Rensen et al., Arterioscler Thromb Vasc Biol, 2006, 26, 169-175; van Rossenberg et al., Gene Ther, 2004, 11, 457-464; Sato et al., J Am Chem Soc, 2004, 126, 14013-14022; Lee et al., J Org Chem, 2012, 77, 7564-7571; Biessen et al., FASEB J, 2000, 14, 1784-1792; Rajur et al., Bioconjug Chem, 1997, 8, 935-940; Duff et al., Methods Enzymol, 2000, 313, 297-321; Maier et al., Bioconjug Chem, 2003, 14, 18-29; Jayaprakash et al., Org Lett, 2010, 12, 5410-5413; Manoharan, Antisense Nucleic Acid Drug Dev, 2002, 12, 103-128; Merwin et al., Bioconjug Chem, 1994, 5, 612-620; Tomiya et al., Bioorg Med Chem, 2013, 21, 5275-5281; International applications WO1998/013381; WO2011/038356; WO1997/046098; WO2008/098788; WO2004/101619; WO2012/037254; WO2011/120053; WO2011/100131; WO2011/163121; WO2012/177947; WO2013/033230; WO2013/075035; WO2012/083185; WO2012/083046; WO2009/082607; WO2009/134487; WO2010/144740; WO2010/148013; WO1997/020563; WO2010/088537; WO2002/043771; WO2010/129709; WO2012/068187; WO2009/126933; WO2004/024757; WO2010/054406; WO2012/089352; WO2012/089602; WO2013/166121; WO2013/165816; U.S. Pat. Nos. 4,751,219; 8,552,163; 6,908,903; 7,262,177; 5,994,517; 6,300,319; 8,106,022; 7,491,805; 7,491,805; 7,582,744; 8,137,695; 6,383,812; 6,525,031; 6,660,720; 7,723,509; 8,541,548; 8,344,125; 8,313,772; 8,349,308; 8,450,467; 8,501,930; 8,158,601; 7,262,177; 6,906,182; 6,620,916; 8,435,491; 8,404,862; 7,851,615; Published U.S. Patent Application Publications US2011/0097264; US2011/0097265; US2013/0004427; US2005/0164235; US2006/0148740; US2008/0281044; US2010/0240730; US2003/0119724; US2006/0183886; US2008/0206869; US2011/0269814; US2009/0286973; US2011/0207799; US2012/0136042; US2012/0165393; US2008/0281041; US2009/0203135; US2012/0035115; US2012/0095075; US2012/0101148; US2012/0128760; US2012/0157509; US2012/0230938; US2013/0109817; US2013/0121954; US2013/0178512; US2013/0236968; US2011/0123520; US2003/0077829; US2008/0108801; and US2009/0203132.

### Compositions and Methods for Formulating Pharmaceutical Compositions

[0271] Compounds described herein may be admixed with pharmaceutically acceptable active or inert substances for the preparation of pharmaceutical compositions. Compositions and methods for the formulation of pharmaceutical compositions are dependent upon a number of criteria, including, but not limited to, route of administration, extent of disease, or dose to be administered.

[0272] Certain embodiments provide pharmaceutical compositions comprising one or more compounds or a salt thereof. In certain embodiments, the compounds are antisense compounds or oligomeric compounds. In certain embodiments, the compounds comprise or consist of a modified oligonucleotide. In certain such embodiments, the pharmaceutical composition comprises a suitable pharmaceutically acceptable diluent or carrier. In certain embodiments, a pharmaceutical composition comprises a sterile saline solution and one or more compound. In certain embodiments, such pharmaceutical composition consists of a sterile saline solution and one or more compound. In certain embodiments, the sterile saline is pharmaceutical grade saline. In certain embodiments, a pharmaceutical composition comprises one or more compound and sterile water. In certain embodiments, a pharmaceutical composition consists of one compound and sterile water. In certain embodiments, the sterile water is pharmaceutical grade water. In certain embodiments, a pharmaceutical composition comprises or consists of one or more compound and phosphate-buffered saline (PBS). In certain embodiments, a pharmaceutical composition consists of one or more compound and sterile PBS. In certain embodiments, the sterile PBS is pharmaceutical grade PBS. Compositions and methods for the formulation of pharmaceutical compositions are dependent upon a number of criteria, including, but not limited to, route of administration, extent of disease, or dose to be administered.

[0273] Certain embodiments provide pharmaceutical compositions suitable for aerosolization and/or dispersal by a nebulizer or inhaler. Such devices are well known in the art. In certain such embodiments, the pharmaceutical composition is a solid comprising particles of compounds that are of respirable size. A solid particulate composition can optionally contain a dispersant which serves to facilitate the formation of an aerosol, e.g., lactose. Solid pharmaceutical compositions comprising an oligonucleotide can also be aerosolized using any solid particulate medicament aerosol generator known in the art, e.g., a dry powder inhaler. In certain embodiments, the powder employed in the inhaler consists of the compound comprising the active compound or of a powder blend comprising the active compound, a suitable powder diluent, and an optional surfactant.

[0274] In certain embodiments, the pharmaceutical composition is a liquid. In certain such embodiments, the liquid is administered as an aerosol that is produced by any suitable means, such as with a nebulizer or inhaler. See, e.g., U.S. Pat. No. 4,501,729. Nebulizers are devices that transform solutions or suspensions into an aerosol mist and are well known in the art. Suitable nebulizers include jet nebulizers, ultrasonic nebulizers, electronic mesh nebulizers, and vibrating mesh nebulizers. Companies such as PARI and Vectura sell some types of such suitable nebulizers. In certain embodiments, the aerosol is produced by a metered dose inhaler, which typically contains a suspension or solution formulation of the active compound in a liquefied propellant. Inhalers suitable for dispensing liquid aerosol also include certain inhalers sold by Respimat (See, e.g., Anderson, Int J Chron Obstruct Pulmon Dis. 1, 251 (2006).) Pharmaceutical compositions suitable for aerosolization can comprise propellants, surfactants, co-solvents, dispersants, preservatives, and/or other additives or excipients.

[0275] A compound described herein complementary to an α-ENaC nucleic acid can be utilized in pharmaceutical compositions by combining the compound with a suitable pharmaceutically acceptable diluent or carrier and/or additional components such that the pharmaceutical composition is suitable for aerosolization by a nebulizer. In certain embodiments, a pharmaceutically acceptable diluent is phosphate buffered saline. Accordingly, in one embodiment, employed in the methods described herein is a pharmaceutical composition comprising a compound complementary to an α-ENaC nucleic acid and a pharmaceutically acceptable diluent. In certain embodiments, the pharmaceutically acceptable diluent is phosphate buffered saline. In certain embodiments, the compound comprises or consists of a modified oligonucleotide provided herein.

[0276] Pharmaceutical compositions comprising compounds provided herein encompass any pharmaceutically acceptable salts, esters, or salts of such esters, or any other oligonucleotide which, upon administration to an animal, including a human, is capable of providing (directly or indirectly) the biologically active metabolite or residue thereof. In certain embodiments, the compounds are antisense compounds or oligomeric compounds. In certain embodiments, the compound comprises or consists of a modified oligonucleotide. Accordingly, for example, the disclosure is also drawn to pharmaceutically acceptable salts of compounds, prodrugs, pharmaceutically acceptable salts of such prodrugs, and other bioequivalents. Suitable pharmaceutically acceptable salts include, but are not limited to, sodium and potassium salts.

[0277] A prodrug can include the incorporation of additional nucleosides at one or both ends of a compound which are cleaved by endogenous nucleases within the body, to form the active compound.

[0278] In certain embodiments, the compounds or compositions further comprise a pharmaceutically acceptable carrier or diluent.

### EXAMPLES

[0279] The Examples below describe the screening process used to identify lead compounds targeted to α-ENaC. Out of over 1,900 oligonucleotides that were screened, many potent and tolerable oligonucleotides were identified, and compounds 797308, 797495, 826763, 827307, 827359, and 827392 emerged as the top lead compounds. In particular, compound 827359 exhibited the best combination of properties in terms of potency and tolerability.

### Non-Limiting Disclosure and Incorporation by Reference

[0280] Although the sequence listing accompanying this filing identifies each sequence as either “RNA” or “DNA” as required, in reality, those sequences may be modified with any combination of chemical modifications. One of skill in the art will readily appreciate that such designation as “RNA” or “DNA” to describe modified oligonucleotides is, in certain instances, arbitrary. For example, an oligonucleotide comprising a nucleoside comprising a 2′-OH sugar moiety and a thymine nucleobase could be described as a DNA having an RNA sugar, or as an RNA having a DNA nucleobase.

[0281] Accordingly, nucleic acid sequences provided herein, including, but not limited to those in the sequence listing, are intended to encompass nucleic acids containing any combination of unmodified or modified RNA and/or DNA, including, but not limited to such nucleic acids having modified nucleobases. By way of further example and without limitation, an oligonucleotide having the nucleobase sequence “ATCGATCG” encompasses any oligonucleotides having such nucleobase sequence, whether modified or unmodified, including, but not limited to, such compounds comprising RNA bases, such as those having sequence “AUCGAUCG” and those having some DNA bases and some RNA bases such as “AUCGATCG” and compounds having other modified nucleobases, such as “AT^{m}CGAUCG,” wherein ^{m}C indicates a cytosine base comprising a methyl group at the 5-position.

[0282] While certain compounds, compositions and methods described herein have been described with specificity in accordance with certain embodiments, the following examples serve only to illustrate the compounds described herein and are not intended to limit the same. Each of the references recited in the present application is incorporated herein by reference in its entirety.

### Example 1: Effect of Modified Oligonucleotides Complementary to α-ENaC In Vitro

[0283] Modified oligonucleotides complementary to one or more human α-ENaC nucleic acids were designed and tested for their effect on α-ENaC mRNA in vitro. The modified oligonucleotides were tested in a series of experiments that had similar culture conditions.

[0284] Cultured Hep3B cells at a density of 20,000 cells per well were transfected using electroporation with 2,000 nM of modified oligonucleotide or no modified oligonucleotide for untreated controls. After approximately 24 hours, RNA was isolated from the cells and α-ENaC mRNA levels were measured by quantitative real-time PCR. Human primer probe set hSCNN1A_LTS01170 (forward sequence ACATCCCAGGAATGGGTCTTC, designated herein as SEQ ID NO: 3; reverse sequence ACTTTGGCCACTCCATTTCTCTT, designated herein as SEQ ID NO: 4; probe sequence TGCTATCGCGACAGAACAATTACACCGTC, designated herein as SEQ ID: 5) was used to measure mRNA levels. α-ENaC mRNA levels were normalized to total RNA content, as measured by RIBOGREEN®. Results are presented in the tables below as normalized α-ENaC mRNA level, relative to untreated control cells (these conditions describe a “Standard Cell Assay”).

[0285] The modified oligonucleotides in the tables below each have a 3-10-3 phosphothiorate cEt gapmer motif. The modified oligonucleotides are 16 nuceobases in length, wherein the central gap segment contains ten 2′-deoxynucleosides and is flanked by wing segments on the 3′ and 5′ ends, each containing three cEt nucleosides. All cytosine residues throughout each modified oligonucletoide are 5-methyl cytosines. The intermucleoside linkages are all phosphorothioate intermucleoside linkages.

[0286] Each modified oligonucleotide listed in the tables below is 10000 complementary to the human α-ENaC nucleic acid sequence of GenBank Number NM_001038.5 (designated herein as SEQ ID NO: 1), the complement of GenBank Number NC_000012.12, truncated from nucleosides 6343001 to 6380000 (designated herein as SEQ ID NO: 2), and/or GenBank Number NG_011945.1 (designated herein as SEQ ID NO: 1957). “Start Site” indicates the 5′-most nucleoside of the designated α-ENaC nucleic acid to which the oligonucleotide is complementary. “Stop Site” indicates the 3′-most nucleoside of the human α-ENaC nucleic acid to which the oligonucleotide is complementary. ‘N/A’ indicates that the modified oligonucleotide is not complementary to that particular nucleic acid with 100% complementarity. Several oligonucleotides match two or more sites on the mRNA, as shown in the tables below. As shown below, modified oligonucleotides complementary to human α-ENaC reduced the amount of human α-ENaC mRNA in vitro.

TABLE 1
Percent level of human α-ENaC mRNA

| | SEQ | SEQ | | | SEQ | SEQ | |
|---|---|---|---|---|---|---|---|
| | ID: 1 | ID: 1 | | α-ENaC | ID: 2 | ID 2: | SEQ |
| Compound | Start | Stop | | (% | Start | Stop | ID |
| Number | Site | Site | Sequence | control) | Site | Site | NO |
| 668181 | 523 | 538 | CTTCATGCGGTTGTGC | 37 | 5451 | 5466 | 6 |
| 668248 | 1240 | 1255 | AGGCATGGAAGACATC | 94 | 24196 | 24211 | 7 |
| 668279 | 1575 | 1590 | ATGTAGGCACAGCCAC | 30 | 25489 | 25504 | 8 |
| 668280 | 1580 | 1595 | AGAAGATGTAGGCACA | 27 | 25494 | 25509 | 9 |
| 668324 | 1930 | 1945 | GCCCAGGTTGGACAGG | 54 | 31759 | 31774 | 10 |
| 668325 | 1954 | 1969 | GCCGAACCACAGGCTC | 72 | 31783 | 31798 | 11 |
| 668358 | 2599 | 2614 | TGTCAAAGCTCCAAGT | 43 | 32428 | 32443 | 12 |
| 668364 | 2766 | 2781 | ACCCAAGTTCAAGAGG | 76 | 32595 | 32610 | 13 |
| 797074 | 4 | 19 | TTAGACGCAGACAGGC | 73 | 4265 | 4280 | 14 |
| 797075 | 30 | 45 | GAGAAGGCGGACTCTG | 88 | 4291 | 4306 | 15 |
| 797076 | 43 | 58 | GAGTACTGGACCTGAG | 64 | 4304 | 4319 | 16 |
| 797077 | 51 | 66 | TGAACTGGGAGTACTG | 71 | 4312 | 4327 | 17 |
| 797078 | 63 | 78 | CCCGAGGGCAGGTGAA | 97 | 4324 | 4339 | 18 |
| 797079 | 75 | 90 | GGAAGGAGGGCTCCCG | 98 | 4336 | 4351 | 19 |
| 797080 | 82 | 97 | TTCCGAAGGAAGGAGG | 123 | 4343 | 4358 | 20 |
| 797081 | 90 | 105 | CGGGAGTTTTCCGAAG | 135 | 4351 | 4366 | 21 |
| 797082 | 97 | 112 | TCAGAGCCGGGAGTTT | 64 | 4358 | 4373 | 22 |
| 797083 | 110 | 125 | GGCTGAGGAGGAGTCA | 86 | 4371 | 4386 | 23 |
| 797084 | 135 | 150 | TAAAGGTGAGCAGGGC | 107 | 4396 | 4411 | 24 |
| 797085 | 137 | 152 | ATTAAAGGTGAGCAGG | 96 | 4398 | 4413 | 25 |
| 797086 | 139 | 154 | CAATTAAAGGTGAGCA | 137 | 4400 | 4415 | 26 |
| 797087 | 141 | 156 | CTCAATTAAAGGTGAG | 150 | 4402 | 4417 | 27 |
| 797088 | 142 | 157 | TCTCAATTAAAGGTGA | 73 | 4403 | 4418 | 28 |
| 797089 | 147 | 162 | TAGCATCTCAATTAAA | 61 | 4408 | 4423 | 29 |
| 797090 | 151 | 166 | TCATTAGCATCTCAAT | 104 | 4412 | 4427 | 30 |
| 797091 | 158 | 173 | AGGAATCTCATTAGCA | 70 | 4419 | 4434 | 31 |
| 797092 | 168 | 183 | TGGAAGCGACAGGAAT | 94 | 4429 | 4444 | 32 |
| 797093 | 177 | 192 | GGCCAGGGATGGAAGC | 100 | 4438 | 4453 | 33 |
| 797094 | 213 | 228 | GTGCAGCGGCCTGGCT | 73 | 4474 | 4489 | 34 |
| 797095 | 22 | 236 | CCTGACAGGTGCAGCG | 71 | 4482 | 4497 | 35 |
| 797096 | 235 | 250 | CTCCAGCTTGTTCCCC | 41 | 5163 | 5178 | 36 |
| | 295 | 310 | | | 5223 | 5238 | |
| 797097 | 237 | 252 | TCCTCCAGCTTGTTCC | 49 | 5165 | 5180 | 37 |
| | 297 | 312 | | | 5225 | 5240 | |
| 797098 | 238 | 253 | CTCCTCCAGCTTGTTC | 58 | 5166 | 5181 | 38 |
| | 298 | 313 | | | 5226 | 5241 | |
| 797099 | 240 | 255 | TGCTCCTCCAGCTTGT | 26 | 5168 | 5183 | 39 |
| | 300 | 315 | | | 5228 | 5243 | |
| 797100 | 242 | 257 | CCTGCTCCTCCAGCTT | 19 | 5170 | 5185 | 40 |
| | 302 | 317 | | | 5230 | 5245 | |
| 797101 | 244 | 259 | GTCCTGCTCCTCCAGC | 21 | 5172 | 5187 | 41 |
| | 304 | 319 | | | 5232 | 5247 | |
| 797102 | 251 | 266 | GTCTAGGGTCCTGCTC | 41 | 5179 | 5194 | 42 |
| 797103 | 258 | 273 | TGCAGAGGTCTAGGGT | 27 | 5186 | 5201 | 43 |
| 797104 | 268 | 283 | TGGTATGGGCTGCAGA | 18 | 5196 | 5211 | 44 |
| 797105 | 277 | 292 | CATGAGACCTGGTATG | 85 | 5205 | 5220 | 45 |
| 797106 | 311 | 326 | GGCTAGAGTCCTGCTC | 78 | 5239 | 5254 | 46 |
| 797107 | 329 | 344 | CTGGAGTGGACTGTGG | 73 | 5257 | 5272 | 47 |
| 797108 | 403 | 418 | CGCCGTGGGCTGCTGG | 60 | 5331 | 5346 | 48 |
| 797109 | 424 | 439 | CTCGATCAGGGCCTCC | 33 | 5352 | 5367 | 49 |
| 797110 | 438 | 453 | TAGGAGCGGTGGAACT | 51 | 5366 | 5381 | 50 |
| 797111 | 440 | 455 | GGTAGGAGCGGTGGAA | 32 | 5368 | 5383 | 51 |
| 797112 | 447 | 462 | AGCTCTCGGTAGGAGC | 84 | 5375 | 5390 | 52 |
| 797113 | 454 | 469 | CTCGAAGAGCTCTCGG | 34 | 5382 | 5397 | 53 |
| 797114 | 462 | 477 | CAGAAGAACTCGAAGA | 48 | 5390 | 5405 | 54 |
| 797115 | 534 | 549 | CAGAAGGCCGTCTTCA | 30 | 5462 | 5477 | 55 |
| 797116 | 537 | 552 | GCCCAGAAGGCCGTCT | 41 | 5465 | 5480 | 56 |
| 797117 | 554 | 569 | TGCAGAGCCACAGCAC | 47 | 5482 | 5497 | 57 |
| 797118 | 561 | 576 | CCAAAGGTGCAGAGCC | 17 | 5489 | 5504 | 58 |
| 797119 | 568 | 583 | CATCATGCCAAAGGTG | 26 | 5496 | 5511 | 59 |
| 797120 | 576 | 591 | TGCCAGTACATCATGC | 45 | 5504 | 5519 | 60 |
| 797121 | 583 | 598 | GCCGAATTGCCAGTAC | 20 | 5511 | 5526 | 61 |
| 797122 | 592 | 607 | GAAAAGCAGGCCGAAT | 49 | 5520 | 5535 | 62 |
| 797123 | 604 | 619 | GAAGTACTCTCCGAAA | 36 | 5532 | 5547 | 63 |
| 797124 | 642 | 657 | TCCGAGTTGAGGTTGA | 25 | 5570 | 5585 | 64 |
| 797125 | 651 | 666 | ACGAGCTTGTCCGAGT | 23 | 5579 | 5594 | 65 |
| 797126 | 682 | 697 | ATTGAGGGTGCAGATG | 58 | 5610 | 5625 | 66 |
| 797127 | 704 | 719 | TAATTTCCGGGTACCT | 30 | 16289 | 16304 | 67 |
| 797128 | 736 | 751 | TGTGATGCGGTCCAGC | 24 | 16321 | 16336 | 68 |
| 797129 | 760 | 775 | GTACAGGTCAAAGAGC | 20 | 16345 | 16360 | 69 |
| 797130 | 765 | 780 | TATTTGTACAGGTCAA | 20 | 16350 | 16365 | 70 |
| 797131 | 767 | 782 | TGTATTTGTACAGGTC | 13 | 16352 | 16367 | 71 |
| 797132 | 778 | 793 | GGTGAAGGAGCTGTAT | 35 | 16363 | 16378 | 72 |
| 797133 | 785 | 800 | CGAGAGTGGTGAAGGA | 72 | 16370 | 16385 | 73 |
| 797134 | 793 | 808 | GCCGGCCACGAGAGTG | 101 | 16378 | 16393 | 74 |
| 797135 | 802 | 817 | GCTGCGGGAGCCGGCC | 59 | 16387 | 16402 | 75 |
| 797136 | 809 | 824 | CGCGACGGCTGCGGGA | 38 | 16394 | 16409 | 76 |
| 797137 | 817 | 832 | CCGCAGGTCGCGACGG | 74 | 16402 | 16417 | 77 |
| 797138 | 880 | 895 | TCGACGGGCCCCGTGA | 41 | 16465 | 16480 | 78 |
| 797139 | 890 | 905 | CGCTACGGGCTCGACG | 20 | 16475 | 16490 | 79 |
| 797140 | 901 | 916 | GCTGGAGGCCACGCTA | 21 | 16486 | 16501 | 80 |
| 797141 | 942 | 957 | TTCCAGTCCTTCCAGT | 45 | 16527 | 16542 | 81 |
| 797142 | 950 | 965 | AGCCGATCTTCCAGTC | 44 | 16535 | 16550 | 82 |
| 797143 | 961 | 976 | GCACAGCTGGAAGCCG | 30 | N/A | N/A | 83 |
| 797144 | 977 | 992 | CCGATTTGTTCTGGTT | 19 | 17763 | 17778 | 84 |
| 797145 | 984 | 999 | AAGCAGTCCGATTTGT | 74 | 17770 | 17785 | 85 |
| 797146 | 1002 | 1017 | GATGAGTATGTCTGGT | 18 | 17788 | 17803 | 86 |
| 797147 | 1016 | 1031 | CCGCATCCACCCCTGA | 27 | 17802 | 17817 | 87 |
| 797148 | 1044 | 1059 | ATGTAGTGGAAGCGGT | 59 | 17830 | 17845 | 88 |
| 797149 | 1057 | 1072 | CGACAGGATGTTGATG | 45 | 17843 | 17858 | 89 |
| 797150 | 1066 | 1081 | TGGCAGCCTCGACAGG | 24 | 17852 | 17867 | 90 |
| 797151 | 1077 | 1092 | GGCAGAGTCTCTGGCA | 39 | 17863 | 17878 | 91 |
| 797152 | 1087 | 1102 | CTCCAGGGATGGCAGA | 60 | 17873 | 17888 | 92 |
| 797153 | 1111 | 1126 | GATGAAGTTGCCCAGC | 24 | 17897 | 17912 | 93 |
| 797154 | 1118 | 1133 | AGGCGAAGATGAAGTT | 51 | 17904 | 17919 | 94 |
| 797155 | 1128 | 1143 | TTGAAGCGGCAGGCGA | 48 | 17914 | 17929 | 95 |
| 797156 | 1143 | 1158 | TTGCAGGAGACCTGGT | 45 | 17929 | 17944 | 96 |
| 797157 | 1156 | 1171 | GTAATTCGCCTGGTTG | 102 | N/A | N/A | 97 |
| 797158 | 1163 | 1178 | AGTGAGAGTAATTCGC | 53 | N/A | N/A | 98 |
| 797159 | 1227 | 1242 | ATCCAGAGGTTGGAGT | 105 | 24183 | 24198 | 99 |
| 797160 | 1235 | 1250 | TGGAAGACATCCAGAG | 50 | 24191 | 24206 | 100 |
| 797161 | 1244 | 1259 | TTCCAGGCATGGAAGA | 68 | 24200 | 24215 | 101 |
| 797162 | 1256 | 1271 | GACCGTTGTTGATTCC | 28 | N/A | N/A | 102 |
| 797163 | 1264 | 1279 | CAGGGACAGACCGTTG | 22 | N/A | N/A | 103 |
| 797164 | 1272 | 1287 | CGCAGCATCAGGGACA | 14 | 24569 | 24584 | 104 |
| 797165 | 1289 | 1304 | AGTCATTCTGCTCTGC | 9 | 24586 | 24601 | 105 |
| 797166 | 1293 | 1308 | ATGAAGTCATTCTGCT | 27 | 24590 | 24605 | 106 |
| 797167 | 1297 | 1312 | GGGAATGAAGTCATTC | 37 | 24594 | 24609 | 107 |
| 797168 | 1315 | 1330 | AGTCACTGTGGACAGC | 20 | 24612 | 24627 | 108 |
| 797169 | 1330 | 1345 | CATTACCCGGGCCCCA | 53 | 24627 | 24642 | 109 |
| 797170 | 1355 | 1370 | AGGCAGGTTCATCCTG | 54 | 24652 | 24667 | 110 |
| 797171 | 1362 | 1377 | TCCATAAAGGCAGGTT | 48 | 24659 | 24674 | 111 |
| 797172 | 1370 | 1385 | CACCATCATCCATAAA | 48 | 24667 | 24682 | 112 |
| 797173 | 1373 | 1388 | AGCCACCATCATCCAT | 31 | 24670 | 24685 | 113 |
| 797174 | 1377 | 1392 | TTAAAGCCACCATCAT | 39 | 24674 | 24689 | 114 |
| 797175 | 1384 | 1399 | CCGCAAGTTAAAGCCA | 24 | 24681 | 24696 | 115 |
| 797176 | 1391 | 1406 | CGCCAGGCCGCAAGTT | 18 | 24688 | 24703 | 116 |
| 797177 | 1414 | 1429 | CCTCATGCTGATGGAG | 40 | 24711 | 24726 | 117 |
| 797178 | 1429 | 1444 | GTCCAGGGTTTCCTTC | 48 | N/A | N/A | 118 |
| 797179 | 1439 | 1454 | CCCCAAGTCTGTCCAG | 49 | 25159 | 25174 | 119 |
| 797180 | 1449 | 1464 | CCATAATCGCCCCCAA | 15 | 25169 | 25184 | 120 |
| 797181 | 1465 | 1480 | ATTCTTGGTGCAGTCG | 18 | 25185 | 25200 | 121 |
| 797182 | 1475 | 1490 | CATCACTGCCATTCTT | 30 | 25195 | 25210 | 122 |
| 797183 | 1482 | 1497 | ACAGGAACATCACTGC | 22 | 25202 | 25217 | 123 |
| 797184 | 1495 | 1510 | GTAAAGGTTCTCAACA | 84 | 25215 | 25230 | 124 |
| 797185 | 1502 | 1517 | TTGAAGGGTAAAGGTT | 57 | 25222 | 25237 | 125 |
| 797186 | 1524 | 1539 | ATACACACCTGCTGTG | 87 | N/A | N/A | 126 |
| 797187 | 1533 | 1548 | CAGGAGTGAATACACA | 65 | 25447 | 25462 | 127 |
| 797188 | 1552 | 1567 | GATCATGCTCTCCTGG | 13 | 25466 | 25481 | 128 |
| 797189 | 1563 | 1578 | CCACACTCCTTGATCA | 36 | 25477 | 25492 | 129 |
| 797190 | 1570 | 1585 | GGCACAGCCACACTCC | 29 | 25484 | 25499 | 130 |
| 797191 | 1573 | 1588 | GTAGGCACAGCCACAC | 18 | 25487 | 25502 | 131 |
| 797192 | 1578 | 1593 | AAGATGTAGGCACAGC | 17 | 25492 | 25507 | 132 |
| 797193 | 1586 | 1601 | GCGGATAGAAGATGTA | 20 | 25500 | 25515 | 133 |
| 797194 | 1613 | 1628 | AGTCACAGTACTCCAC | 40 | 25527 | 25542 | 134 |
| 797195 | 1623 | 1638 | TGCTTTCTGTAGTCAC | 39 | 25537 | 25552 | 135 |
| 797196 | 1631 | 1646 | AGGAACTGTGCTTTCT | 48 | 25545 | 25560 | 136 |
| 797197 | 1644 | 1659 | TAGCAGTACCCCCAGG | 51 | N/A | N/A | 137 |
| 797198 | 1651 | 1666 | CTTATAGTAGCAGTAC | 42 | 30597 | 30612 | 138 |
| 797199 | 1663 | 1678 | GTCAACCTGGAGCTTA | 14 | 30609 | 30624 | 139 |
| 797200 | 1671 | 1686 | GAGGAGAAGTCAACCT | 66 | 30617 | 30632 | 140 |
| 797201 | 1684 | 1699 | GCCCAGGTGGTCTGAG | 43 | 30630 | 30645 | 141 |
| 797202 | 1692 | 1707 | GTGAAACAGCCCAGGT | 55 | 30638 | 30653 | 142 |
| 797203 | 1700 | 1715 | GGCACTTGGTGAAACA | 77 | 30646 | 30661 | 143 |
| 797204 | 1707 | 1722 | GGCTTCCGGCACTTGG | 22 | 30653 | 30668 | 144 |
| 797205 | 1715 | 1730 | CGCTGCATGGCTTCCG | 23 | N/A | N/A | 145 |
| 797206 | 1731 | 1746 | AGCTGGTAGCTGGTCA | 49 | 30782 | 30797 | 146 |
| 797207 | 1739 | 1754 | CAGCAGAGAGCTGGTA | 52 | 30790 | 30805 | 147 |
| 797208 | 1746 | 1761 | GAGTAACCAGCAGAGA | 47 | 30797 | 30812 | 148 |
| 797218 | 1875 | 1890 | TTGTAGTTCAGCTCCT | 41 | 31231 | 31246 | 149 |
| 797219 | 1885 | 1900 | AGAATTGGTTTTGTAG | 55 | 31241 | 31256 | 150 |
| 797220 | 1895 | 1910 | AGGGAGACTCAGAATT | 101 | 31251 | 31266 | 151 |
| 797221 | 1919 | 1934 | ACAGGAGGGTGACCAT | 41 | 31748 | 31763 | 152 |
| 797222 | 1941 | 1956 | CTCCACTGGCTGCCCA | 56 | 31770 | 31785 | 153 |
| 797223 | 1948 | 1963 | CCACAGGCTCCACTGG | 69 | 31777 | 31792 | 154 |
| 797224 | 1950 | 1965 | AACCACAGGCTCCACT | 64 | 31779 | 31794 | 155 |
| 797225 | 1955 | 1970 | AGCCGAACCACAGGCT | 139 | 31784 | 31799 | 156 |
| 797226 | 1963 | 1978 | CACCGAGGAGCCGAAC | 76 | 31792 | 31807 | 157 |
| 797227 | 1971 | 1986 | ACAGACAACACCGAGG | 24 | 31800 | 31815 | 158 |
| 797228 | 1978 | 1993 | CTCCACCACAGACAAC | 46 | 31807 | 31822 | 159 |
| 797229 | 1988 | 2003 | GCTCAGCCATCTCCAC | 63 | 31817 | 31832 | 160 |
| 797230 | 1997 | 2012 | CAAAGACGAGCTCAGC | 99 | 31826 | 31841 | 161 |
| 797231 | 2005 | 2020 | CAGCAGGTCAAAGACG | 96 | 31834 | 31849 | 162 |
| 797232 | 2017 | 2032 | GAACATGATGACCAGC | 22 | 31846 | 31861 | 163 |
| 797233 | 2024 | 2039 | GCATGAGGAACATGAT | 41 | 31853 | 31868 | 164 |
| 797234 | 2037 | 2052 | AACCTTCGGAGCAGCA | 18 | 31866 | 31881 | 165 |
| 797235 | 2045 | 2060 | GGCTTCGGAACCTTCG | 19 | 31874 | 31889 | 166 |
| 797236 | 2052 | 2067 | CAGTATCGGCTTCGGA | 19 | 31881 | 31896 | 167 |
| 797237 | 2060 | 2075 | CTGGAGACCAGTATCG | 35 | 31889 | 31904 | 168 |
| 797238 | 2104 | 2119 | TGCCAGGGTGGAGGCT | 81 | 31933 | 31948 | 169 |
| 797239 | 2127 | 2142 | CAGAAGTGGGAAGGAG | 63 | 31956 | 31971 | 170 |
| 797240 | 2151 | 2166 | AAGGACAGAGACATGG | 33 | 31980 | 31995 | 171 |
| 797241 | 2187 | 2202 | GTCAAGGCTGGAGAGG | 33 | 32016 | 32031 | 172 |
| 797242 | 2218 | 2233 | GCCCAGGGTGGCATAG | 76 | 32047 | 32062 | 173 |
| 797243 | 2259 | 2274 | GAGGAACTGGCCCCTG | 58 | 32088 | 32103 | 174 |
| 797244 | 2268 | 2283 | GGACAGGTGGAGGAAC | 76 | 32097 | 32112 | 175 |
| 797245 | 2275 | 2290 | CCCCAGAGGACAGGTG | 73 | 32104 | 32119 | 176 |
| 797246 | 2304 | 2319 | GAGAAACCTCTCCTTC | 64 | 32133 | 32148 | 177 |
| 797247 | 2329 | 2344 | ACCAGAGGAGCATCTG | 34 | 32158 | 32173 | 178 |
| 797248 | 2350 | 2365 | TGCCAGGGCCAGCACC | 50 | 32179 | 32194 | 179 |
| 797249 | 2358 | 2373 | TTCAATCTTGCCAGGG | 28 | 32187 | 32202 | 180 |
| 797250 | 2366 | 2381 | GCACATCCTTCAATCT | 36 | 32195 | 32210 | 181 |
| 797251 | 2377 | 2392 | GAGGAAGCCCTGCACA | 51 | 32206 | 32221 | 182 |
| 797252 | 2394 | 2409 | AGTTTGGGCGGCTCTG | 54 | 32223 | 32238 | 183 |
| 797253 | 2402 | 2417 | TCAACGGCAGTTTGGG | 22 | 32231 | 32246 | 184 |
| 797254 | 2409 | 2424 | CCACACATCAACGGCA | 23 | 32238 | 32253 | 185 |
| 797255 | 2427 | 2442 | ACCCATCTTGCTTCCC | 22 | 32256 | 32271 | 186 |
| 797256 | 2446 | 2461 | AGCAACTTCCTGAGCC | 36 | 32275 | 32290 | 187 |
| 797257 | 2461 | 2476 | AGCTACTGTTCTTGGA | 23 | 32290 | 32305 | 188 |
| 797258 | 2481 | 2496 | CACTTCTGGGCAGCTT | 14 | 32310 | 32325 | 189 |
| 797259 | 2488 | 2503 | GCCAAGGCACTTCTGG | 41 | 32317 | 32332 | 190 |
| 797260 | 2501 | 2516 | GTACAGGGCTGGAGCC | 65 | 32330 | 32345 | 191 |
| 797261 | 2522 | 2537 | GTTCAGAGGCAGTACC | 24 | 32351 | 32366 | 192 |
| 797262 | 2529 | 2544 | CCAGAGTGTTCAGAGG | 17 | 32358 | 32373 | 193 |
| 797263 | 2550 | 2565 | AGCCGCAGTTGGGTGG | 28 | 32379 | 32394 | 194 |
| 797264 | 2558 | 2573 | AGAGACTTAGCCGCAG | 12 | 32387 | 32402 | 195 |
| 797265 | 2565 | 2580 | GGGAAAAAGAGACTTA | 21 | 32394 | 32409 | 196 |
| 797266 | 2576 | 2591 | GGCTGATCCAAGGGAA | 14 | 32405 | 32420 | 197 |
| 797267 | 2590 | 2605 | TCCAAGTTTCGCTTGG | 85 | 32419 | 32434 | 198 |
| 797268 | 2598 | 2613 | GTCAAAGCTCCAAGTT | 26 | 32427 | 32442 | 199 |
| 797269 | 2611 | 2626 | AGGAAAGTTCCTTGTC | 21 | 32440 | 32455 | 200 |
| 797270 | 2626 | 2641 | TATCAGCGGTTTCTTA | 52 | 32455 | 32470 | 201 |
| 797271 | 2675 | 2690 | GGAAACCCGTGCATGC | 27 | 32504 | 32519 | 202 |
| 797272 | 2684 | 2699 | CGCTGGGCAGGAAACC | 25 | 32513 | 32528 | 203 |
| 797273 | 2694 | 2709 | CTTAAGCCGTCGCTGG | 31 | 32523 | 32538 | 204 |
| 797274 | 2716 | 2731 | GGCCAGGCCAGTCGGG | 64 | 32545 | 32560 | 205 |
| 797275 | 2725 | 2740 | GAGCAGTGTGGCCAGG | 18 | 32554 | 32569 | 206 |
| 797276 | 2732 | 2747 | TACTGGAGAGCAGTGT | 24 | 32561 | 32576 | 207 |
| 797277 | 2744 | 2759 | AGACATCTGTGCTACT | 10 | 32573 | 32588 | 208 |
| 797278 | 2757 | 2772 | CAAGAGGAGGAGCAGA | 46 | 32586 | 32601 | 209 |
| 797279 | 2765 | 2780 | CCCAAGTTCAAGAGGA | 68 | 32594 | 32609 | 210 |
| 797280 | 2803 | 2818 | CCTAAGTAACAAAGGG | 44 | 32632 | 32647 | 211 |
| 797281 | 2811 | 2826 | GGGAATTGCCTAAGTA | 44 | 32640 | 32655 | 212 |
| 797282 | 2857 | 2872 | ACTTACCCGGGTCTGC | 77 | 32686 | 32701 | 213 |
| 797283 | 2864 | 2879 | TGCCTTTACTTACCCG | 34 | 32693 | 32708 | 214 |
| 797284 | 2883 | 2898 | GCTAGAGGAGCCCTGG | 60 | 32712 | 32727 | 215 |
| 797285 | 2890 | 2905 | GTATGAGGCTAGAGGA | 70 | 32719 | 32734 | 216 |
| 797286 | 2897 | 2912 | GGCACGGGTATGAGGC | 71 | 32726 | 32741 | 217 |
| 797287 | 2914 | 2929 | GGGCATGGCTCTGTGA | 34 | 32743 | 32758 | 218 |
| 797288 | 2937 | 2952 | AAAGACACAGGGCAGA | 27 | 32766 | 32781 | 219 |
| 797289 | 2944 | 2959 | AGGTATGAAAGACACA | 17 | 32773 | 32788 | 220 |
| 797290 | 2952 | 2967 | ACATGTAGAGGTATGA | 17 | 32781 | 32796 | 221 |
| 797291 | 2962 | 2977 | TCTCAAGCAGACATGT | 20 | 32791 | 32806 | 222 |
| 797292 | 2969 | 2984 | GGAAATATCTCAAGCA | 15 | 32798 | 32813 | 223 |
| 797293 | 2983 | 2998 | AACTTTCAGGCTGAGG | 15 | 32812 | 32827 | 224 |
| 797294 | 3013 | 3028 | CATAGGAGTTCTCTGG | 10 | 32842 | 32857 | 225 |
| 797295 | 3020 | 3035 | AGGGATGCATAGGAGT | 19 | 32849 | 32864 | 226 |
| 797296 | 3033 | 3048 | GAGCAGGGTTCTAAGG | 60 | 32862 | 32877 | 227 |
| 797297 | 3046 | 3061 | AGTAATGGTGTCTGAG | 12 | 32875 | 32890 | 228 |
| 797298 | 3053 | 3068 | TCACAAAAGTAATGGT | 26 | 32882 | 32897 | 229 |
| 797299 | 3072 | 3087 | CAAGATGTGGCAGAAG | 58 | 32901 | 32916 | 230 |
| 797300 | 3079 | 3094 | GGGAAGACAAGATGTG | 22 | 32908 | 32923 | 231 |
| 797301 | 3093 | 3108 | AGTGATCAATTTTGGG | 22 | 32922 | 32937 | 232 |
| 797302 | 3103 | 3118 | GAGAAGGCGGAGTGAT | 61 | 32932 | 32947 | 233 |
| 797303 | 3118 | 3133 | GCTACGGGAGCCCAGG | 27 | 32947 | 32962 | 234 |
| 797304 | 3127 | 3142 | TTATAGTGTGCTACGG | 13 | 32956 | 32971 | 235 |
| 797305 | 3134 | 3149 | GCAGATGTTATAGTGT | 21 | 32963 | 32978 | 236 |
| 797306 | 3144 | 3159 | CAACACTCCAGCAGAT | 53 | 32973 | 32988 | 237 |
| 797307 | 3151 | 3166 | GCAACAGCAACACTCC | 6 | 32980 | 32995 | 238 |
| 797308 | 3160 | 3175 | AAGTATGGTGCAACAG | 9 | 32989 | 33004 | 239 |
| 797309 | 3167 | 3182 | TACAAGAAAGTATGGT | 11 | 32996 | 33011 | 240 |
| 797310 | 3180 | 3195 | GGAGACACAAATGTAC | 37 | 33009 | 33024 | 241 |
| 797311 | 3199 | 3214 | TTACAGTCTAGTTGGG | 20 | 33028 | 33043 | 242 |
| 797312 | 3209 | 3224 | CGCAAGGCACTTACAG | 13 | 33038 | 33053 | 243 |
| 797313 | 3227 | 3242 | CAAGATTCAGTCCCTG | 15 | 33056 | 33071 | 244 |
| 797314 | 3234 | 3249 | AAACGGGCAAGATTCA | 21 | 33063 | 33078 | 245 |
| 797315 | 3241 | 3256 | CATACATAAACGGGCA | 19 | 33070 | 33085 | 246 |
| 797316 | 3248 | 3263 | CATGGAGCATACATAA | 52 | 33077 | 33092 | 247 |
| 797317 | 3255 | 3270 | GGCTAGACATGGAGCA | 39 | 33084 | 33099 | 248 |
| 797318 | 3263 | 3278 | GGATGATGGGCTAGAC | 18 | 33092 | 33107 | 249 |
| 797319 | 3271 | 3286 | TCCAAGCAGGATGATG | 82 | 33100 | 33115 | 250 |
| 797320 | 3282 | 3297 | TGCCTACTTGCTCCAA | 51 | 33111 | 33126 | 251 |
| 797321 | 3291 | 3306 | TTGAGCTCCTGCCTAC | 21 | 33120 | 33135 | 252 |
| 797322 | 3293 | 3308 | TATTGAGCTCCTGCCT | 52 | 33122 | 33137 | 253 |
| 797323 | 3294 | 3309 | TTATTGAGCTCCTGCC | 35 | 33123 | 33138 | 254 |
| 797324 | N/A | N/A | AATCAGTTTTCTGAGG | 80 | 2644 | 2659 | 255 |
| 797325 | N/A | N/A | AAGGATAAATCAGTTT | 98 | 2651 | 2666 | 256 |
| 797326 | N/A | N/A | AGAAACTGACCCTTCC | 75 | 2668 | 2683 | 257 |
| 797327 | N/A | N/A | CCTAATGAAGAAACTG | 78 | 2676 | 2691 | 258 |
| 797328 | N/A | N/A | CTTCATTGTCCTAATG | 103 | 2685 | 2700 | 259 |
| 797329 | N/A | N/A | AGCTGGATTTTTCTTC | 68 | 2697 | 2712 | 260 |
| 797330 | N/A | N/A | GAAGGGACAGCTGGAT | 64 | 2705 | 2720 | 261 |
| 797331 | N/A | N/A | CATGATACCTCCCCTT | 47 | 2722 | 2737 | 262 |
| 797332 | N/A | N/A | TGATACTGCTCATGAT | 73 | 2732 | 2747 | 263 |
| 797333 | N/A | N/A | TCCTAGCACCTCCCTT | 57 | 4867 | 4882 | 264 |
| 797334 | N/A | N/A | ACCTTTCGAGTTTTGT | 26 | 4882 | 4897 | 265 |
| 797335 | N/A | N/A | TGATAGGGCCACCTTT | 47 | 4892 | 4907 | 266 |
| 797336 | N/A | N/A | CTAGAACGGCCTCTCC | 48 | 4918 | 4933 | 267 |
| 797337 | N/A | N/A | CCGGAGCTGGGCTTCC | 69 | 4934 | 4949 | 268 |
| 797338 | N/A | N/A | CAAAAGTGCCGGAGCT | 36 | 4942 | 4957 | 269 |
| 797339 | N/A | N/A | CAGCAGACCTGCGGGA | 33 | 4966 | 4981 | 270 |
| 797340 | N/A | N/A | CTGGAGCCAGCAGACC | 16 | 4973 | 4988 | 271 |
| 797341 | N/A | N/A | CCACATTCTCCCACTC | 50 | 5011 | 5026 | 272 |
| 797342 | N/A | N/A | TCCCACCCTGCGCCCA | 82 | 5024 | 5039 | 273 |
| 797343 | N/A | N/A | GGCCATGCCCATGTCC | 65 | 5037 | 5052 | 274 |
| 797344 | N/A | N/A | CCCGAGTGAGGCTGCC | 22 | 5056 | 5071 | 275 |
| 797345 | N/A | N/A | GGCTGAGCTCTGGGCC | 72 | 5101 | 5116 | 276 |
| 797346 | N/A | N/A | GGTCAGGGTCAAGGCT | 50 | 5113 | 5128 | 277 |
| 797347 | N/A | N/A | CCCCGGAGTGGATTGG | 71 | 5139 | 5154 | 278 |
| 797348 | N/A | N/A | GGCCTTTCGGCTTGAG | 72 | 15860 | 15875 | 279 |
| 797349 | N/A | N/A | GGCGAGTGTCGGTGGC | 43 | 15873 | 15888 | 280 |
| 797350 | N/A | N/A | GGTCATCCCGCCCTGA | 40 | 15897 | 15912 | 281 |
| 797351 | N/A | N/A | CGGTACCCAGGTCATC | 51 | 15906 | 15921 | 282 |
| 797352 | N/A | N/A | CGTGACCGCGGTACCC | 57 | 15914 | 15929 | 283 |
| 797353 | N/A | N/A | GGTGAGGGCCTCGGCC | 88 | 15934 | 15949 | 284 |
| 797354 | N/A | N/A | CGGAACTTGTCTGCCC | 45 | 15968 | 15983 | 285 |
| 797355 | N/A | N/A | GGGAACCCGGAACTTG | 85 | 15975 | 15990 | 286 |
| 797356 | N/A | N/A | CCTAGAAGGGAACCCG | 38 | 15982 | 15997 | 287 |
| 797357 | N/A | N/A | GCCCGGACCTAGAAGG | 82 | 15989 | 16004 | 288 |
| 797358 | N/A | N/A | AGAGAGGCAGGAGGCG | 104 | 16034 | 16049 | 289 |
| 797359 | N/A | N/A | TTGAAGGAGAGAGGCA | 52 | 16041 | 16056 | 290 |
| 797360 | N/A | N/A | GTGGACTGTTTATTGA | 67 | 16053 | 16068 | 291 |
| 797361 | N/A | N/A | GGACACTGTGGACTGT | 51 | 16060 | 16075 | 292 |
| 797362 | N/A | N/A | GCCCAGCCGGGACACT | 71 | 16069 | 16084 | 293 |
| 797363 | N/A | N/A | CCACGGCGAGCCCAGC | 69 | 16078 | 16093 | 294 |
| 797364 | N/A | N/A | GCGGAGGCCACGGCGA | 83 | 16085 | 16100 | 295 |
| 797365 | N/A | N/A | CGGGAAGGCGGAGGCC | 78 | 16092 | 16107 | 296 |
| 797366 | N/A | N/A | AAACAGGTGTGTCCGC | 77 | 16108 | 16123 | 297 |
| 797367 | N/A | N/A | GTGAAGGGTAAACAGG | 77 | 16117 | 16132 | 298 |
| 797368 | N/A | N/A | GGCCGTCCGGCGGTGA | 55 | 16129 | 16144 | 299 |
| 797369 | N/A | N/A | GGAGAAGCCTGGGCGG | 83 | 16170 | 16185 | 300 |
| 797370 | N/A | N/A | GTCCATCCCGGAGAAG | 63 | 16179 | 16194 | 301 |
| 797371 | N/A | N/A | CGGGAGGCCGGTCCAT | 52 | 16189 | 16204 | 302 |
| 797372 | N/A | N/A | GGTCAGGGTCCTCATC | 79 | 16212 | 16227 | 303 |
| 797373 | N/A | N/A | AGCGAGTGTCTGGCCC | 94 | 16234 | 16249 | 304 |
| 797374 | N/A | N/A | GAAGAGGGTCAGGCCA | 52 | 16260 | 16275 | 305 |
| 797375 | N/A | N/A | GAGTAATTCCTGGTTG | 103 | N/A | N/A | 306 |
| 797376 | N/A | N/A | TGTCTTTAAAACGGAC | 112 | 3040 | 3055 | 307 |
| 797377 | N/A | N/A | GAGGAGATAGGCCTGC | 42 | 3098 | 3113 | 308 |
| 797378 | N/A | N/A | AAAAAGGGCTGGAGGA | 113 | 3291 | 3306 | 309 |
| 797379 | N/A | N/A | AATCAGACCCAAAAAG | 134 | 3301 | 3316 | 310 |
| 797380 | N/A | N/A | GAGGAGGGTCAGAGAA | 69 | 3315 | 3330 | 311 |
| 797381 | N/A | N/A | TTGCAGGAATGTGGGC | 80 | 3593 | 3608 | 312 |
| 797382 | N/A | N/A | GGCCAGGAATGTGTAA | 103 | 3632 | 3647 | 313 |
| 797383 | N/A | N/A | GGACATTCTGTTCTTT | 97 | 3667 | 3682 | 314 |
| 797384 | N/A | N/A | GACAATAGAGAGGGAC | 93 | 4090 | 4105 | 315 |
| 797385 | N/A | N/A | GCAGAAAGAGGGAGAC | 85 | 4103 | 4118 | 316 |
| 797386 | 346 | 361 | GTTCCCCTTCATGAGC | 26 | 5154 | 5169 | 317 |
| | | | | | 5274 | 5289 | |
| 797387 | 349 | 364 | CTTGTTCCCCTTCATG | 15 | 5157 | 5172 | 318 |
| | | | | | 5277 | 5292 | |
| 797388 | N/A | N/A | AGTAAGCTGGAGGCTC | 69 | 5784 | 5799 | 319 |
| 797389 | N/A | N/A | TGCAAGCACTCCCTCC | 40 | 5932 | 5947 | 320 |
| 797390 | N/A | N/A | GAAAAGGGATGCAGCT | 81 | 5967 | 5982 | 321 |
| 797391 | N/A | N/A | AGCATTTTAGCCTGGG | 20 | 6265 | 6280 | 322 |
| 797392 | N/A | N/A | TATACAAAAGCACTCA | 62 | 6422 | 6437 | 323 |
| 797393 | N/A | N/A | GAATTATTCATGAATC | 42 | 6523 | 6538 | 324 |
| 797394 | N/A | N/A | TGGAATATACGAAGGG | 24 | 6782 | 6797 | 325 |
| 797395 | N/A | N/A | CATATTTTCAACCACA | 25 | 7349 | 7364 | 326 |
| 797396 | N/A | N/A | TAATACTGCCCACCTC | 76 | 7746 | 7761 | 327 |
| 797397 | N/A | N/A | TTGATTTAGATTCATT | 61 | 8239 | 8254 | 328 |
| 797398 | N/A | N/A | ACTTAAAGTGTAATGG | 89 | 8562 | 8577 | 329 |
| 797399 | N/A | N/A | TGCCTGATCCCTACTT | 59 | 8574 | 8589 | 330 |
| 797400 | N/A | N/A | GAAAAATATGTCTGTG | 53 | 9080 | 9095 | 331 |
| 797401 | N/A | N/A | AGCCGTGGGAGCCGCC | 31 | 9458 | 9473 | 332 |
| 797402 | N/A | N/A | GTCCAGGACGGAGCAG | 32 | 9587 | 9602 | 333 |
| 797403 | N/A | N/A | AAGACATCCGATCTTG | 92 | 10021 | 10036 | 334 |
| 797404 | N/A | N/A | CACTAAACAGAAAGCA | 38 | 10042 | 10057 | 335 |
| 797405 | N/A | N/A | GCATAAGATAAGACGG | 15 | 10454 | 10469 | 336 |
| 797406 | N/A | N/A | CACAAACCTGTGACAA | 48 | 10544 | 10559 | 337 |
| 797407 | N/A | N/A | CTCCTGCCACCCTACG | 66 | 10638 | 10653 | 338 |
| | | | | | 10661 | 10676 | |
| | | | | | 10684 | 10699 | |
| 797408 | N/A | N/A | CTCCCTCCTGCCACCC | 50 | 10642 | 10657 | 339 |
| | | | | | 10665 | 10680 | |
| | | | | | 10688 | 10703 | |
| | | | | | 10711 | 10726 | |
| 797409 | N/A | N/A | CACCTCCCTCCTGCCA | 43 | 10645 | 10660 | 340 |
| | | | | | 10668 | 10683 | |
| | | | | | 10691 | 10706 | |
| 797410 | N/A | N/A | ACGCACCTCCCTCCTG | 30 | 10648 | 10663 | 341 |
| | | | | | 10671 | 10686 | |
| 797411 | N/A | N/A | CCTACGCACCTCCCTC | 54 | 10651 | 10666 | 342 |
| | | | | | 10674 | 10689 | |
| 797412 | N/A | N/A | CACCCTACGCACCTCC | 59 | 10654 | 10669 | 343 |
| | | | | | 10677 | 10692 | |
| 797413 | N/A | N/A | TGCCACCCTACGCACC | 29 | 10657 | 10672 | 344 |
| | | | | | 10680 | 10695 | |
| 797414 | N/A | N/A | GAAGAATCCAGATCCC | 56 | 10944 | 10959 | 345 |
| 797415 | N/A | N/A | AGGAAGAATCCAGATC | 118 | 10946 | 10961 | 346 |
| 797416 | N/A | N/A | GCGAATTTGCCTTTCT | 40 | 10973 | 10988 | 347 |
| 797417 | N/A | N/A | TGAGAAAATACTCAGT | 31 | 11051 | 11066 | 348 |
| 797418 | N/A | N/A | TCTGAGATGTAGGGCC | 41 | 11208 | 11223 | 349 |
| 797419 | N/A | N/A | CTCCAACCACCACACT | 73 | 11307 | 11322 | 350 |
| 797420 | N/A | N/A | TGGCACAGCTAGCAAA | 65 | 11337 | 11352 | 351 |
| 797421 | N/A | N/A | CTTTAGGCTAAAACTT | 101 | 11469 | 11484 | 352 |
| 797422 | N/A | N/A | CACTATGCATGAAGAA | 40 | 11521 | 11536 | 353 |
| 797423 | N/A | N/A | GACAAGTGGGCTGCCT | 27 | 11611 | 11626 | 354 |
| 797424 | N/A | N/A | TTAATTGTTAAAAGAA | 72 | 11860 | 11875 | 355 |
| | | | | | 12660 | 12675 | |
| 797425 | N/A | N/A | ATTTAATTGTTAAAAG | 103 | 11862 | 11877 | 356 |
| | | | | | 12662 | 12677 | |
| 797426 | N/A | N/A | TATTTAATTGTTAAAA | 113 | 11863 | 11878 | 357 |
| | | | | | 12663 | 12678 | |
| 797427 | N/A | N/A | CATTATTTAATTGTTA | 127 | 11866 | 11881 | 358 |
| | | | | | 12666 | 12681 | |
| 797428 | N/A | N/A | AAAGAATGGCAAGCAT | 25 | 11937 | 11952 | 359 |
| 797429 | N/A | N/A | GGTTGAAGGTGTGTTT | 36 | 11988 | 12003 | 360 |
| 797430 | N/A | N/A | TGTCAAACCTGAGTGG | 76 | 12309 | 12324 | 361 |
| 797431 | N/A | N/A | CAACATCTCGACTGTC | 25 | 12321 | 12336 | 362 |
| 797432 | N/A | N/A | GATAGAGATAGCATTC | 71 | 12401 | 12416 | 363 |
| 797433 | N/A | N/A | ACAGACAAAACCAGTT | 85 | 12417 | 12432 | 364 |
| 797434 | N/A | N/A | TGGCAATCATAGCTAG | 38 | 12731 | 12746 | 365 |
| 797435 | N/A | N/A | CGACGAAACCTTGTAT | 53 | 12931 | 12946 | 366 |
| 797436 | N/A | N/A | AAGAATGGTAATCTGC | 57 | 13042 | 13057 | 367 |
| 797437 | N/A | N/A | GCCAAAAAGCCTGAAG | 28 | 13125 | 13140 | 368 |
| 797438 | N/A | N/A | TCATAGCCATTTTATT | 83 | 13148 | 13163 | 369 |
| 797439 | N/A | N/A | AAAGATTTGTACATGA | 23 | 13168 | 13183 | 370 |
| | | | | | 13483 | 13498 | |
| 797440 | N/A | N/A | ATATTAAGAAGGAATG | 71 | 13566 | 13581 | 371 |
| 797441 | N/A | N/A | TACGATCATTTTGGAA | 42 | 13770 | 13785 | 372 |
| 797442 | N/A | N/A | GAACAGACCTACATTT | 74 | 13832 | 13847 | 373 |
| | | | | | 14129 | 14144 | |
| 797443 | N/A | N/A | CAGACCTACATTTTTT | 48 | 14126 | 14141 | 374 |
| 797444 | N/A | N/A | ACCGTATGTAGTAGGC | 10 | 14152 | 14167 | 375 |
| 797445 | N/A | N/A | AACAAATAATCCCTAG | 88 | 14172 | 14187 | 376 |
| 797446 | N/A | N/A | TCTAGAAGATGGAAGA | 56 | 14238 | 14253 | 377 |
| 797447 | N/A | N/A | GAACCATAAACACTCT | 19 | 14251 | 14266 | 378 |
| 797448 | N/A | N/A | CTATACAGGCAAAAAT | 80 | 14304 | 14319 | 379 |
| 797449 | N/A | N/A | CAAAAGTGTGCCACCA | 31 | 14828 | 14843 | 380 |
| 797450 | N/A | N/A | ATGGATTCAACACAAT | 26 | 14993 | 15008 | 381 |
| 797451 | N/A | N/A | AAATTAATTGCATTTC | 103 | 15184 | 15199 | 382 |
| | | | | | 15212 | 15227 | |
| 797452 | N/A | N/A | TTGCATTTCCGTCTCA | 23 | 15205 | 15220 | 383 |
| 797453 | N/A | N/A | AAAAATTAATTGCATT | 86 | 15214 | 15229 | 384 |
| | | | | | 15530 | 15545 | |
| 797454 | N/A | N/A | AAAAAAATTAATTGCA | 106 | 15216 | 15231 | 385 |
| | | | | | 15532 | 15547 | |
| 797455 | N/A | N/A | AAAAAAAATTAATTGC | 67 | 15217 | 15232 | 386 |
| | | | | | 15533 | 15548 | |
| 797456 | N/A | N/A | TAACAAACTGAACAAG | 73 | 15574 | 15589 | 387 |
| 797457 | N/A | N/A | TGTTTCGGGTGCGGCC | 62 | 15731 | 15746 | 388 |
| 797458 | N/A | N/A | CCAAAGACTGTTCTAA | 44 | 15749 | 15764 | 389 |
| 797459 | N/A | N/A | ACCCACCCCGCCTCCC | 100 | 15769 | 15784 | 390 |
| 797460 | N/A | N/A | TTAGAATCTCCAACTC | 52 | 15804 | 15819 | 391 |
| 797461 | N/A | N/A | GGTCAGGAAAGGAGCG | 22 | 16629 | 16644 | 392 |
| 797462 | N/A | N/A | GGTGTTATTTTAATTA | 84 | 16730 | 16745 | 393 |
| 797463 | N/A | N/A | AAAAGCTTGGGCACCA | 27 | 16749 | 16764 | 394 |
| 797464 | N/A | N/A | CAAGAGCTGGGACTAG | 65 | 17403 | 17418 | 395 |
| 797465 | N/A | N/A | AAAGAATGAGTGATCT | 65 | 17676 | 17691 | 396 |
| 797466 | N/A | N/A | GTCAACAAGCATTTCC | 15 | 18034 | 18049 | 397 |
| 797467 | N/A | N/A | GGCATTTTTTTAGTCA | 59 | 18046 | 18061 | 398 |
| 797468 | N/A | N/A | CAAGATCCATGCTTCC | 14 | 18218 | 18233 | 399 |
| 797469 | N/A | N/A | GGATGATGTGATACAT | 9 | 18734 | 18749 | 400 |
| 797470 | N/A | N/A | CAATCTAAGAAATAGG | 24 | 18757 | 18772 | 401 |
| 797471 | N/A | N/A | TCCAAATGCCTAGAAC | 16 | 18859 | 18874 | 402 |
| 797472 | N/A | N/A | GGCGGACTCAGGCTTA | 75 | 19484 | 19499 | 403 |
| 797473 | N/A | N/A | TGACAGTTAGAGGAAC | 30 | 19515 | 19530 | 404 |
| 797474 | N/A | N/A | GGAAAGCACAGGTGTC | 29 | 19535 | 19550 | 405 |
| | | | | | 19617 | 19632 | |
| 797475 | N/A | N/A | AGGGAAAGCACAGGTG | 41 | 19537 | 19552 | 406 |
| | | | | | 19619 | 19634 | |
| 797476 | N/A | N/A | GCATAGGGAAAGCACA | 33 | 19541 | 19556 | 407 |
| | | | | | 19623 | 19638 | |
| 797477 | N/A | N/A | GGGCATAGGGAAAGCA | 33 | 19543 | 19558 | 408 |
| | | | | | 19625 | 19640 | |
| 797478 | N/A | N/A | GAGGGCATAGGGAAAG | 60 | 19545 | 19560 | 409 |
| | | | | | 19627 | 19642 | |
| 797479 | N/A | N/A | GGTGAGGGCATAGGGA | 40 | 19548 | 19563 | 410 |
| | | | | | 19630 | 19645 | |
| 797480 | N/A | N/A | ATCGGGTGAGGGCATA | 34 | 19552 | 19567 | 411 |
| | | | | | 19634 | 19649 | |
| 797481 | N/A | N/A | ACAGAGCAAAGGGAGG | 24 | 19569 | 19584 | 412 |
| | | | | | 19652 | 19667 | |
| 797482 | N/A | N/A | ACACAGAGCAAAGGGA | 45 | 19571 | 19586 | 413 |
| | | | | | 19654 | 19669 | |
| 797483 | N/A | N/A | GCACACAGAGCAAAGG | 19 | 19573 | 19588 | 414 |
| | | | | | 19656 | 19671 | |
| 797484 | N/A | N/A | AGGCACACAGAGCAAA | 25 | 19575 | 19590 | 415 |
| | | | | | 19658 | 19673 | |
| 797485 | N/A | N/A | AGGCAGGCACACAGAG | 26 | 19579 | 19594 | 416 |
| | | | | | 19662 | 19677 | |
| 797486 | N/A | N/A | GGGGAGGCAGGCACAC | 46 | 19583 | 19598 | 417 |
| | | | | | 19666 | 19681 | |
| 797487 | N/A | N/A | GCACAGGTGTCCATGG | 34 | 19612 | 19627 | 418 |
| 797488 | N/A | N/A | GGAATAGTTACATGTG | 10 | 19866 | 19881 | 419 |
| 797489 | N/A | N/A | ACCCGATAGCTGGTTG | 19 | 20416 | 20431 | 420 |
| 797490 | N/A | N/A | TCACACTATTAATTAG | 89 | 20435 | 20450 | 421 |
| 797491 | N/A | N/A | ACTGAACGATTTTAAA | 64 | 20606 | 20621 | 422 |
| 797492 | N/A | N/A | CCATGCTAAGGAGTAC | 30 | 20650 | 20665 | 423 |
| 797493 | N/A | N/A | GTACAGGGTTTCTTTT | 62 | 20864 | 20879 | 424 |
| | | | | | 27928 | 27943 | |
| 797494 | N/A | N/A | TTAAATGGTGTGACCA | 10 | 21648 | 21663 | 425 |
| 797495 | N/A | N/A | ACGATTACAGGGATTC | 9 | 21751 | 21766 | 426 |
| 797496 | N/A | N/A | AGCTGTATTAGCTCAC | 71 | 21771 | 21786 | 427 |
| 797497 | N/A | N/A | GTTACTTACTTAATCT | 17 | 21895 | 21910 | 428 |
| 797498 | N/A | N/A | AACAAGTATTAGATGT | 93 | 21923 | 21938 | 429 |
| 797499 | N/A | N/A | GCACAGACTCCAGAAT | 41 | 21970 | 21985 | 430 |
| 797500 | N/A | N/A | CAGTATAATGTGATGG | 5 | 22302 | 22317 | 431 |
| 797501 | N/A | N/A | GAGATACACACTAAGC | 5 | 22344 | 22359 | 432 |
| 797502 | N/A | N/A | CAGCGGTGGAGAAACA | 31 | 22750 | 22765 | 433 |
| 797503 | N/A | N/A | ATGGAAAGCAGGCACA | 8 | 22774 | 22789 | 434 |
| 797504 | N/A | N/A | AAGTATAATGGTGGGT | 32 | 22799 | 22814 | 435 |
| 797505 | N/A | N/A | TAAAATGTAGGATGAT | 86 | 23033 | 23048 | 436 |
| 797506 | N/A | N/A | ACTAAAGAGAAGAGGG | 68 | 23136 | 23151 | 437 |
| 797507 | N/A | N/A | AGCAAATCACAGGTTC | 5 | 23303 | 23318 | 438 |
| 797508 | N/A | N/A | CAGTACCAAGTGTTTC | 17 | 23442 | 23457 | 439 |
| 797509 | N/A | N/A | AGGAGATAGAGGAGAT | 39 | 23589 | 23604 | 440 |
| 797510 | N/A | N/A | CTTAAACTCCTACAGG | 59 | 24017 | 24032 | 441 |
| 797511 | N/A | N/A | AGCTCAAGGTAAGTAC | 98 | 24277 | 24292 | 442 |
| 797512 | N/A | N/A | TCCCAGTCAGCATCCT | 89 | 24733 | 24748 | 443 |
| 797513 | N/A | N/A | CCCCAGGGTCCACCCT | 75 | 24902 | 24917 | 444 |
| 797514 | N/A | N/A | CTCACATACACAACCC | 64 | 25321 | 25336 | 445 |
| 797515 | N/A | N/A | CTGCAGGTTGTTTTTA | 26 | 26098 | 26113 | 446 |
| | | | | | 26434 | 26449 | |
| 797516 | N/A | N/A | AATGGATACAGTATGT | 98 | 26688 | 26703 | 447 |
| 797517 | N/A | N/A | AGTCAAAAGGAAAGAG | 25 | 26848 | 26863 | 448 |
| 797518 | N/A | N/A | CAAACAACTCAACTGT | 24 | 26864 | 26879 | 449 |
| 797519 | N/A | N/A | AGCATGAACTCCAGGA | 11 | 26959 | 26974 | 450 |
| 797520 | N/A | N/A | AAATGCAACAGACTGT | 30 | 27542 | 27557 | 451 |
| 797521 | N/A | N/A | ACCCAAATCCCTACCA | 46 | 27624 | 27639 | 452 |
| 797522 | N/A | N/A | GATATAAATTATCTCA | 88 | 27780 | 27795 | 453 |
| 797523 | N/A | N/A | GCTAATGAGTACAAGG | 9 | 28243 | 28258 | 454 |
| 797524 | N/A | N/A | ACCATACGGATGAACC | 13 | 28742 | 28757 | 455 |
| 797525 | N/A | N/A | TCAAAAAAGGTTAAAC | 90 | 28996 | 29011 | 456 |
| 797526 | N/A | N/A | ATGTACAATGGTGATG | 34 | 29040 | 29055 | 457 |
| 797527 | N/A | N/A | AAAGAAAAATGGGAAC | 87 | 29535 | 29550 | 458 |
| | | | | | 29852 | 29867 | |
| 797528 | N/A | N/A | TTATAATGATGCCTTA | 78 | 30466 | 30481 | 459 |
| 797529 | N/A | N/A | CCCAAGAGGTCTCCCA | 58 | 30522 | 30537 | 460 |
| 797530 | N/A | N/A | CATAATACCCAGAGAA | 57 | 30895 | 30910 | 461 |
| 797531 | N/A | N/A | CACTCATACACATAAT | 68 | 30905 | 30920 | 462 |
| 797532 | N/A | N/A | TGTCACCCAGAGAAAA | 66 | 31564 | 31579 | 463 |
| 797533 | N/A | N/A | AGGTACATTGACGATG | 85 | 31720 | 31735 | 464 |

TABLE 2
Percent level of human α-ENaC mRNA

| | SEQ | SEQ | | | SEQ | SEQ | |
|---|---|---|---|---|---|---|---|
| | ID: 1 | ID: 1 | | α-ENaC | ID: 2 | ID 2: | SEQ |
| Compound | Start | Stop | | (% | Start | Stop | ID |
| Number | Site | Site | Sequence | control) | Site | Site | NO |
| 797192 | 1578 | 1593 | AAGATGTAGGCACAGC | 30 | 25492 | 25507 | 132 |
| 797235 | 2045 | 2060 | GGCTTCGGAACCTTCG | 18 | 31874 | 31889 | 166 |
| 797507 | N/A | N/A | AGCAAATCACAGGTTC | 20 | 23303 | 23318 | 438 |
| 826070 | 1 | 16 | GACGCAGACAGGCAAG | 76 | 4262 | 4277 | 465 |
| 826071 | 5 | 20 | TTTAGACGCAGACAGG | 67 | 4266 | 4281 | 466 |
| 826090 | 52 | 67 | GTGAACTGGGAGTACT | 91 | 4313 | 4328 | 467 |
| 826091 | 53 | 68 | GGTGAACTGGGAGTAC | 57 | 4314 | 4329 | 468 |
| 826110 | 145 | 160 | GCATCTCAATTAAAGG | 86 | 4406 | 4421 | 469 |
| 826111 | 163 | 178 | GCGACAGGAATCTCAT | 66 | 4424 | 4439 | 470 |
| 826130 | 195 | 210 | GGAGCCCGCCCGCTGG | 60 | 4456 | 4471 | 471 |
| 826131 | 216 | 231 | CAGGTGCAGCGGCCTG | 79 | 4477 | 4492 | 472 |
| 826150 | 282 | 29 | CCCTCCATGAGACCTG | 30 | 5210 | 5225 | 473 |
| 826151 | 283 | 298 | CCCCTCCATGAGACCT | 19 | 5211 | 5226 | 474 |
| 826170 | 354 | 369 | TCACGCTTGTTCCCCT | 25 | 5282 | 5297 | 475 |
| 826171 | 355 | 370 | CTCACGCTTGTTCCCC | 17 | 5283 | 5298 | 476 |
| 826190 | 439 | 454 | GTAGGAGCGGTGGAAC | 88 | 5367 | 5382 | 477 |
| 826191 | 441 | 456 | CGGTAGGAGCGGTGGA | 64 | 5369 | 5384 | 478 |
| 826209 | 565 | 580 | CATGCCAAAGGTGCAG | 43 | 5493 | 5508 | 479 |
| 826210 | 566 | 581 | TCATGCCAAAGGTGCA | 45 | 5494 | 5509 | 480 |
| 826229 | 606 | 62 | CTGAAGTACTCTCCGA | 23 | 5534 | 5549 | 481 |
| 826230 | 607 | 622 | GCTGAAGTACTCTCCG | 26 | 5535 | 5550 | 482 |
| 826249 | 702 | 717 | ATTTCCGGGTACCTGT | 33 | N/A | N/A | 483 |
| 826250 | 703 | 718 | AATTTCCGGGTACCTG | 40 | 16288 | 16303 | 484 |
| 826267 | 791 | 806 | CGGCCACGAGAGTGGT | 62 | 16376 | 16391 | 485 |
| 826268 | 792 | 807 | CCGGCCACGAGAGTGG | 58 | 16377 | 16392 | 486 |
| 826287 | 828 | 843 | GGCAGAGTCCCCCGCA | 35 | 16413 | 16428 | 487 |
| 826288 | 830 | 845 | GCGGCAGAGTCCCCCG | 38 | 16415 | 16430 | 488 |
| 826307 | 914 | 929 | TGTTGTCCCGCAAGCT | 42 | 16499 | 16514 | 489 |
| 826308 | 916 | 931 | GTTGTTGTCCCGCAAG | 26 | 16501 | 16516 | 490 |
| 826325 | 979 | 994 | GTCCGATTTGTTCTGG | 31 | 17765 | 17780 | 491 |
| 826326 | 980 | 995 | AGTCCGATTTGTTCTG | 58 | 17766 | 17781 | 492 |
| 826345 | 1017 | 1032 | ACCGCATCCACCCCTG | 42 | 17803 | 17818 | 493 |
| 826346 | 1018 | 1033 | CACCGCATCCACCCCT | 41 | 17804 | 17819 | 494 |
| 826365 | 1113 | 1128 | AAGATGAAGTTGCCCA | 41 | 17899 | 17914 | 495 |
| 826366 | 1115 | 1130 | CGAAGATGAAGTTGCC | 55 | 17901 | 17916 | 496 |
| 826385 | 1162 | 1177 | GTGAGAGTAATTCGCC | 65 | N/A | N/A | 497 |
| 826386 | 1164 | 1179 | AAGTGAGAGTAATTCG | 29 | N/A | N/A | 498 |
| 826405 | 1281 | 1296 | TGCTCTGCGCGCAGCA | 62 | 24578 | 24593 | 499 |
| 826406 | 1282 | 1297 | CTGCTCTGCGCGCAGC | 58 | 24579 | 24594 | 500 |
| 826425 | 1354 | 1369 | GGCAGGTTCATCCTGC | 140 | 24651 | 24666 | 50 |
| 826426 | 1356 | 1371 | AAGGCAGGTTCATCCT | 63 | 24653 | 24668 | 502 |
| 826445 | 1405 | 1420 | GATGGAGGTCTCCACG | 67 | 24702 | 24717 | 503 |
| 826446 | 1416 | 1431 | TTCCTCATGCTGATGG | 24 | 24713 | 24728 | 504 |
| 826465 | 1497 | 1512 | GGGTAAAGGTTCTCAA | 25 | 25217 | 25232 | 505 |
| 826466 | 1500 | 1515 | GAAGGGTAAAGGTTCT | 63 | 25220 | 25235 | 506 |
| 826485 | 1579 | 1594 | GAAGATGTAGGCACAG | 32 | 25493 | 25508 | 507 |
| 826504 | 1656 | 1671 | TGGAGCTTATAGTAGC | 30 | 30602 | 30617 | 508 |
| 826505 | 1661 | 1676 | CAACCTGGAGCTTATA | 42 | 30607 | 30622 | 509 |
| 826524 | 1733 | 1748 | AGAGCTGGTAGCTGGT | 67 | 30784 | 30799 | 510 |
| 826525 | 1736 | 1751 | CAGAGAGCTGGTAGCT | 75 | 30787 | 30802 | 511 |
| 826564 | 1992 | 2007 | ACGAGCTCAGCCATCT | 57 | 31821 | 31836 | 512 |
| 826565 | 1993 | 2008 | GACGAGCTCAGCCATC | 16 | 31822 | 31837 | 513 |
| 826584 | 2046 | 2061 | CGGCTTCGGAACCTTC | 23 | 31875 | 31890 | 514 |
| 826603 | 2216 | 2231 | CCAGGGTGGCATAGGC | 28 | 32045 | 32060 | 515 |
| 826604 | 2217 | 2232 | CCCAGGGTGGCATAGG | 42 | 32046 | 32061 | 516 |
| 826623 | 2360 | 2375 | CCTTCAATCTTGCCAG | 31 | 32189 | 32204 | 517 |
| 826624 | 2390 | 2405 | TGGGCGGCTCTGAGAG | 49 | 32219 | 32234 | 518 |
| 826643 | 2464 | 2479 | ATCAGCTACTGTTCTT | 32 | 32293 | 32308 | 519 |
| 826644 | 2476 | 2491 | CTGGGCAGCTTCATCA | 33 | 32305 | 32320 | 520 |
| 826662 | 2575 | 2590 | GCTGATCCAAGGGAAA | 35 | 32404 | 32419 | 521 |
| 826681 | 2610 | 2625 | GGAAAGTTCCTTGTCA | 40 | 32439 | 32454 | 522 |
| 826682 | 2612 | 2627 | TAGGAAAGTTCCTTGT | 32 | 32441 | 32456 | 523 |
| 826701 | 2679 | 2694 | GGCAGGAAACCCGTGC | 74 | 32508 | 32523 | 524 |
| 826702 | 2681 | 2696 | TGGGCAGGAAACCCGT | 64 | 32510 | 32525 | 525 |
| 826721 | 2832 | 2847 | AGCCCTCGGGAGTCAG | 27 | 32661 | 32676 | 526 |
| 826722 | 2835 | 2850 | CCTAGCCCTCGGGAGT | 62 | 32664 | 32679 | 527 |
| 826741 | 2896 | 2911 | GCACGGGTATGAGGCT | 69 | 32725 | 32740 | 528 |
| 826742 | 2949 | 2964 | TGTAGAGGTATGAAAG | 31 | 32778 | 32793 | 529 |
| 826761 | 3012 | 3027 | ATAGGAGTTCTCTGGC | 16 | 32841 | 32856 | 530 |
| 826780 | 3101 | 3116 | GAAGGCGGAGTGATCA | 65 | 32930 | 32945 | 531 |
| 826781 | 3117 | 3132 | CTACGGGAGCCCAGGA | 22 | 32946 | 32961 | 532 |
| 826799 | 3143 | 3158 | AACACTCCAGCAGATG | 40 | 32972 | 32987 | 533 |
| 826800 | 3145 | 3160 | GCAACACTCCAGCAGA | 19 | 32974 | 32989 | 534 |
| 826817 | 3212 | 3227 | GACCGCAAGGCACTTA | 51 | 33041 | 33056 | 535 |
| 826818 | 3213 | 3228 | TGACCGCAAGGCACTT | 19 | 33042 | 33057 | 536 |
| 826836 | 3235 | 3250 | TAAACGGGCAAGATTC | 41 | 33064 | 33079 | 537 |
| 826837 | 3236 | 3251 | ATAAACGGGCAAGATT | 71 | 33065 | 33080 | 538 |
| 826856 | N/A | N/A | TTGTCCTAATGAAGAA | 95 | 2680 | 2695 | 539 |
| 826857 | N/A | N/A | TCCCCTTGGAAGGGAC | 66 | 2713 | 2728 | 540 |
| 826876 | N/A | N/A | AGGATCTGTGTCTCAG | 19 | 4815 | 4830 | 541 |
| 826877 | N/A | N/A | GTCCTAGCACCTCCCT | 15 | 4868 | 4883 | 542 |
| 826896 | N/A | N/A | CCCTAGAACGGCCTCT | 27 | 4920 | 4935 | 543 |
| 826897 | N/A | N/A | CTTCCCTAGAACGGCC | 19 | 4923 | 4938 | 544 |
| 826916 | N/A | N/A | ACCCGAGTGAGGCTGC | 13 | 5057 | 5072 | 545 |
| 826917 | N/A | N/A | GAACCCGAGTGAGGCT | 60 | 5059 | 5074 | 546 |
| 826936 | N/A | N/A | CCACACAGAGCCCGTG | 66 | 2463 | 2478 | 547 |
| 826937 | N/A | N/A | AGCCGGGAAGGCCTCC | 72 | 2486 | 2501 | 548 |
| 826956 | N/A | N/A | CCCAAAAAGGGCTGGA | 66 | 3294 | 3309 | 549 |
| 826957 | N/A | N/A | GCCAAGTGGTGAGCAA | 74 | 3338 | 3353 | 550 |
| 826976 | N/A | N/A | GTTGAATCTGGCAGCC | 64 | 4517 | 4532 | 551 |
| 826977 | N/A | N/A | TGGGACTGGTTCCTTT | 109 | 4536 | 4551 | 552 |
| 826996 | N/A | N/A | TGGCAAAGAGCACCGA | 51 | 6348 | 6363 | 553 |
| 826997 | N/A | N/A | CCAGACCCAACATTGG | 87 | 6361 | 6376 | 554 |
| 827016 | N/A | N/A | GTCCGTAACGCACCTT | 36 | 6807 | 6822 | 555 |
| 827017 | N/A | N/A | CTTTCTTAGTCCGTAA | 41 | 6815 | 6830 | 556 |
| 827036 | N/A | N/A | GACTACAAGGTCAAGT | 77 | 7660 | 7675 | 557 |
| 827056 | N/A | N/A | ATTCACTGCGCTCCCG | 44 | 8755 | 8770 | 558 |
| 827057 | N/A | N/A | TCGGTAGGAGTCATTC | 15 | 8767 | 8782 | 559 |
| 827076 | N/A | N/A | ACAGAAGAGCCCATGC | 55 | 9484 | 9499 | 560 |
| 827077 | N/A | N/A | TCTTACCCCGGTGGCC | 53 | 9507 | 9522 | 561 |
| 827096 | N/A | N/A | CCCTACGCGCCTCCCT | 92 | 10629 | 10644 | 562 |
| 827097 | N/A | N/A | CTGCCACCCTACGCGC | 53 | 10635 | 10650 | 563 |
| 827116 | N/A | N/A | GCCTACCGCATGAAGC | 42 | 11082 | 11097 | 564 |
| 827117 | N/A | N/A | GGGCATAACACTAGAT | 42 | 11100 | 11115 | 565 |
| 827136 | N/A | N/A | TGGACAAGGTTTGACA | 65 | 11623 | 11638 | 566 |
| 827137 | N/A | N/A | GGTTACACCCCCGGCG | 60 | 11650 | 11665 | 567 |
| 827156 | N/A | N/A | GCTACATTAACCACCG | 31 | 12134 | 12149 | 568 |
| 827157 | N/A | N/A | TTGAAAGAGCCCCCAC | 26 | 12166 | 12181 | 569 |
| 827176 | N/A | N/A | CAGGAACTATGGTATT | 18 | 12690 | 12705 | 570 |
| 827177 | N/A | N/A | GCAATCATAGCTAGCA | 116 | 12729 | 12744 | 571 |
| 827196 | N/A | N/A | TTTATGAACAGACCTA | 19 | 14134 | 14149 | 572 |
| 827197 | N/A | N/A | GTAGGCACTTTATGAA | 28 | 14142 | 14157 | 573 |
| 827215 | N/A | N/A | GCATAGATGGTCAACT | 43 | 14438 | 14453 | 574 |
| 827216 | N/A | N/A | GGAGAGACAATAGATC | 31 | 14488 | 14503 | 575 |
| 827235 | N/A | N/A | GGCTTGAGTGCCGCTT | 17 | 15852 | 15867 | 576 |
| 827236 | N/A | N/A | CCGCAGGCGAGTGTCG | 63 | 15878 | 15893 | 577 |
| 827255 | N/A | N/A | ACTAATGGGAACTTCC | 47 | 17363 | 17378 | 578 |
| 827256 | N/A | N/A | CAAGAGATTTGTCCCA | 39 | 17420 | 17435 | 579 |
| 827275 | N/A | N/A | GAGCAGCAGGAGTTCG | 45 | 18126 | 18141 | 580 |
| 827276 | N/A | N/A | CCTCAGATCCAGCAGT | 50 | 18147 | 18162 | 581 |
| 827294 | N/A | N/A | ATACATCCAGAGTCAC | 25 | 18724 | 18739 | 582 |
| 827295 | N/A | N/A | GATACATCCAGAGTCA | 31 | 18725 | 18740 | 583 |
| 827313 | N/A | N/A | CTCCGGAAAATAAACG | 25 | 19270 | 19285 | 584 |
| 827314 | N/A | N/A | GGAGATGGCTCCGGAA | 55 | 19278 | 19293 | 585 |
| 827333 | N/A | N/A | ACCATGGACTTTCTGT | 18 | 19686 | 19701 | 586 |
| 827334 | N/A | N/A | AACCATGGACTTTCTG | 42 | 19687 | 19702 | 587 |
| 827352 | N/A | N/A | CTAACTGGAATAGTTA | 89 | 19872 | 19887 | 588 |
| 827353 | N/A | N/A | ACTAACTGGAATAGTT | 60 | 19873 | 19888 | 589 |
| 827372 | N/A | N/A | ATCATAGTATTCAGCC | 18 | 21087 | 21102 | 590 |
| 827373 | N/A | N/A | AAAAAGGTGGTGTATC | 50 | 21111 | 21126 | 591 |
| 827391 | N/A | N/A | ATTACAGGGATTCATT | 26 | 21748 | 21763 | 592 |
| 827392 | N/A | N/A | CGATTACAGGGATTCA | 20 | 21750 | 21765 | 593 |
| 827409 | N/A | N/A | GGCCAGTAAGAGTGAA | 90 | 22013 | 22028 | 594 |
| 827410 | N/A | N/A | GAATCAGTATAATGTG | 11 | 22306 | 22321 | 595 |
| 827428 | N/A | N/A | TGCCCCCATGGAAAGC | 54 | 22781 | 22796 | 596 |
| 827429 | N/A | N/A | CTGCCCCCATGGAAAG | 32 | 22782 | 22797 | 597 |
| 827448 | N/A | N/A | CTGCAGTAGGACTGCA | 80 | 23326 | 23341 | 598 |
| 827467 | N/A | N/A | AAGCAGGGAGCTTCTC | 80 | 24227 | 24242 | 599 |
| 827468 | N/A | N/A | CGCCATGGAGCAAGCA | 95 | 24238 | 24253 | 600 |
| 827487 | N/A | N/A | TGCAACACTGAGAGGG | 45 | 26035 | 26050 | 601 |
| 827488 | N/A | N/A | GGACAATTCCTTGACA | 38 | 26078 | 26093 | 602 |
| 827507 | N/A | N/A | GACAATCCGCTGCCTT | 15 | 27116 | 27131 | 603 |
| 827508 | N/A | N/A | AGGTAGGGATGGACGC | 15 | 27147 | 27162 | 604 |
| 827527 | N/A | N/A | GGGACTTGCTAATGAG | 50 | 28250 | 28265 | 605 |
| 827528 | N/A | N/A | TGGGACTTGCTAATGA | 48 | 28251 | 28266 | 606 |
| 827546 | N/A | N/A | GTCCACTAACTGATAA | 52 | 28839 | 28854 | 607 |
| 827547 | N/A | N/A | GGTGATGTCACTTCGG | 12 | 29031 | 29046 | 608 |
| 827566 | N/A | N/A | CACATAATACCCAGAG | 61 | 30897 | 30912 | 609 |
| 827567 | N/A | N/A | GGATAGGGTTGTGTCA | 57 | 30925 | 30940 | 610 |

TABLE 3
Percent level of human α-ENaC mRNA

| | SEQ | SEQ | | | | | |
|---|---|---|---|---|---|---|---|
| | ID: | ID: | | | SEQ | SEQ | |
| | 1 | 1 | | α-ENaC | ID: 2 | ID 2: | SEQ |
| Compound | Start | Stop | | (% | Start | Stop | ID |
| Number | Site | Site | Sequence | control) | Site | Site | NO |
| 797494 | N/A | N/A | TTAAATGGTGTGACCA | 12 | 21648 | 21663 | 425 |
| 797524 | N/A | N/A | ACCATACGGATGAACC | 37 | 28742 | 28757 | 455 |
| 826074 | 25 | 40 | GGCGGACTCTGGGCAG | 135 | 4286 | 4301 | 611 |
| 826075 | 28 | 43 | GAAGGCGGACTCTGGG | 121 | 4289 | 4304 | 612 |
| 826076 | 29 | 44 | AGAAGGCGGACTCTGG | 119 | 4290 | 4305 | 613 |
| 826077 | 31 | 46 | TGAGAAGGCGGACTCT | 75 | 4292 | 4307 | 614 |
| 826078 | 32 | 47 | CTGAGAAGGCGGACTC | 70 | 4293 | 4308 | 615 |
| 826079 | 33 | 48 | CCTGAGAAGGCGGACT | 163 | 4294 | 4309 | 616 |
| 826081 | 36 | 51 | GGACCTGAGAAGGCGG | 46 | 4297 | 4312 | 617 |
| 826094 | 73 | 88 | AAGGAGGGCTCCCGAG | 111 | 4334 | 4349 | 618 |
| 826095 | 74 | 89 | GAAGGAGGGCTCCCGA | 196 | 4335 | 4350 | 619 |
| 826096 | 81 | 96 | TCCGAAGGAAGGAGGG | 197 | 4342 | 4357 | 620 |
| 826097 | 83 | 98 | TTTCCGAAGGAAGGAG | 89 | 4344 | 4359 | 621 |
| 826098 | 85 | 100 | GTTTTCCGAAGGAAGG | 125 | 4346 | 4361 | 622 |
| 826099 | 88 | 103 | GGAGTTTTCCGAAGGA | 149 | 4349 | 4364 | 623 |
| 826100 | 91 | 106 | CCGGGAGTTTTCCGAA | 59 | 4352 | 4367 | 624 |
| 826101 | 92 | 107 | GCCGGGAGTTTTCCGA | 98 | 4353 | 4368 | 625 |
| 826114 | 167 | 182 | GGAAGCGACAGGAATC | 162 | 4428 | 4443 | 626 |
| 826115 | 169 | 184 | ATGGAAGCGACAGGAA | 118 | 4430 | 4445 | 627 |
| 826116 | 170 | 185 | GATGGAAGCGACAGGA | 145 | 4431 | 4446 | 628 |
| 826117 | 171 | 186 | GGATGGAAGCGACAGG | 143 | 4432 | 4447 | 629 |
| 826118 | 172 | 187 | GGGATGGAAGCGACAG | 82 | 4433 | 4448 | 630 |
| 826119 | 175 | 190 | CCAGGGATGGAAGCGA | 95 | 4436 | 4451 | 631 |
| 826120 | 176 | 191 | GCCAGGGATGGAAGCG | 54 | 4437 | 4452 | 632 |
| 826121 | 180 | 195 | GCCGGCCAGGGATGGA | 74 | 4441 | 4456 | 633 |
| 826134 | 226 | 241 | GTTCCCCTGACAGGTG | 74 | N/A | N/A | 634 |
| 826135 | 228 | 243 | TTGTTCCCCTGACAGG | 68 | N/A | N/A | 635 |
| 826136 | 229 | 244 | CTTGTTCCCCTGACAG | 102 | N/A | N/A | 636 |
| 826137 | 230 | 245 | GCTTGTTCCCCTGACA | 15 | N/A | N/A | 637 |
| 826138 | 232 | 247 | CAGCTTGTTCCCCTGA | 30 | N/A | N/A | 638 |
| 826139 | 233 | 248 | CCAGCTTGTTCCCCTG | 77 | N/A | N/A | 639 |
| 826140 | 249 | 264 | CTAGGGTCCTGCTCCT | 55 | 5177 | 5192 | 640 |
| 826141 | 254 | 269 | GAGGTCTAGGGTCCTG | 44 | 5182 | 5197 | 641 |
| 826154 | 292 | 307 | CAGCTTGTTCCCCTCC | 33 | 5220 | 5235 | 642 |
| 826155 | 310 | 325 | GCTAGAGTCCTGCTCC | 82 | 5238 | 5253 | 643 |
| 826156 | 312 | 327 | GGGCTAGAGTCCTGCT | 134 | 5240 | 5255 | 644 |
| 826157 | 315 | 330 | GGAGGGCTAGAGTCCT | 91 | 5243 | 5258 | 645 |
| 826158 | 320 | 335 | ACTGTGGAGGGCTAGA | 50 | 5248 | 5263 | 646 |
| 826159 | 321 | 336 | GACTGTGGAGGGCTAG | 59 | 5249 | 5264 | 647 |
| 826160 | 322 | 337 | GGACTGTGGAGGGCTA | 34 | 5250 | 5265 | 648 |
| 826161 | 331 | 346 | CCCTGGAGTGGACTGT | 50 | 5259 | 5274 | 649 |
| 826174 | 360 | 375 | TGCTCCTCACGCTTGT | 27 | 5288 | 5303 | 650 |
| 826175 | 362 | 377 | CCTGCTCCTCACGCTT | 33 | 5290 | 5305 | 651 |
| 826176 | 363 | 378 | CCCTGCTCCTCACGCT | 51 | 5291 | 5306 | 652 |
| 826177 | 386 | 401 | GCGCCGCAGGTTCGGG | 51 | 5314 | 5329 | 653 |
| 826178 | 405 | 420 | TCCGCCGTGGGCTGCT | 52 | 5333 | 5348 | 654 |
| 826179 | 407 | 422 | CCTCCGCCGTGGGCTG | 50 | 5335 | 5350 | 655 |
| 826180 | 411 | 426 | TCCTCCTCCGCCGTGG | 31 | 5339 | 5354 | 656 |
| 826181 | 422 | 437 | CGATCAGGGCCTCCTC | 33 | 5350 | 5365 | 657 |
| 826194 | 446 | 461 | GCTCTCGGTAGGAGCG | 44 | 5374 | 5389 | 658 |
| 826195 | 448 | 463 | GAGCTCTCGGTAGGAG | 94 | 5376 | 5391 | 659 |
| 826196 | 451 | 466 | GAAGAGCTCTCGGTAG | 114 | 5379 | 5394 | 660 |
| 826197 | 453 | 468 | TCGAAGAGCTCTCGGT | 41 | 5381 | 5396 | 661 |
| 826198 | 456 | 471 | AACTCGAAGAGCTCTC | 30 | 5384 | 5399 | 662 |
| 826199 | 457 | 472 | GAACTCGAAGAGCTCT | 95 | 5385 | 5400 | 663 |
| 826200 | 466 | 481 | GTTGCAGAAGAACTCG | 27 | 5394 | 5409 | 664 |
| 826201 | 467 | 482 | TGTTGCAGAAGAACTC | 44 | 5395 | 5410 | 665 |
| 826213 | 575 | 590 | GCCAGTACATCATGCC | 34 | 5503 | 5518 | 666 |
| 826214 | 577 | 592 | TTGCCAGTACATCATG | 58 | 5505 | 5520 | 667 |
| 826215 | 580 | 595 | GAATTGCCAGTACATC | 46 | 5508 | 5523 | 668 |
| 826216 | 581 | 596 | CGAATTGCCAGTACAT | 27 | 5509 | 5524 | 669 |
| 826217 | 582 | 597 | CCGAATTGCCAGTACA | 26 | 5510 | 5525 | 670 |
| 826218 | 585 | 600 | AGGCCGAATTGCCAGT | 102 | 5513 | 5528 | 671 |
| 826219 | 587 | 602 | GCAGGCCGAATTGCCA | 34 | 5515 | 5530 | 672 |
| 826220 | 589 | 604 | AAGCAGGCCGAATTGC | 51 | 5517 | 5532 | 673 |
| 826233 | 626 | 641 | TGTTGAGGCTGACGGG | 14 | 5554 | 5569 | 674 |
| 826234 | 628 | 643 | GATGTTGAGGCTGACG | 28 | 5556 | 5571 | 675 |
| 826235 | 639 | 654 | GAGTTGAGGTTGATGT | 64 | 5567 | 5582 | 676 |
| 826236 | 641 | 656 | CCGAGTTGAGGTTGAT | 32 | 5569 | 5584 | 677 |
| 826237 | 643 | 658 | GTCCGAGTTGAGGTTG | 28 | 5571 | 5586 | 678 |
| 826238 | 644 | 659 | TGTCCGAGTTGAGGTT | 65 | 5572 | 5587 | 679 |
| 826239 | 645 | 660 | TTGTCCGAGTTGAGGT | 40 | 5573 | 5588 | 680 |
| 826240 | 647 | 662 | GCTTGTCCGAGTTGAG | 19 | 5575 | 5590 | 681 |
| 826253 | 731 | 746 | TGCGGTCCAGCTCCTC | 42 | 16316 | 16331 | 682 |
| 826254 | 734 | 749 | TGATGCGGTCCAGCTC | 88 | 16319 | 16334 | 683 |
| 826255 | 737 | 752 | CTGTGATGCGGTCCAG | 38 | 16322 | 16337 | 684 |
| 826256 | 739 | 754 | CTCTGTGATGCGGTCC | 20 | 16324 | 16339 | 685 |
| 826257 | 740 | 755 | GCTCTGTGATGCGGTC | 43 | 16325 | 16340 | 686 |
| 826258 | 759 | 774 | TACAGGTCAAAGAGCG | 52 | 16344 | 16359 | 687 |
| 826259 | 761 | 776 | TGTACAGGTCAAAGAG | 18 | 16346 | 16361 | 688 |
| 826260 | 762 | 777 | TTGTACAGGTCAAAGA | 41 | 16347 | 16362 | 689 |
| 826271 | 798 | 813 | CGGGAGCCGGCCACGA | 55 | 16383 | 16398 | 690 |
| 826272 | 800 | 815 | TGCGGGAGCCGGCCAC | 23 | 16385 | 16400 | 691 |
| 826273 | 803 | 818 | GGCTGCGGGAGCCGGC | 147 | 16388 | 16403 | 692 |
| 826274 | 804 | 819 | CGGCTGCGGGAGCCGG | 70 | 16389 | 16404 | 693 |
| 826275 | 805 | 820 | ACGGCTGCGGGAGCCG | 104 | 16390 | 16405 | 694 |
| 826276 | 807 | 822 | CGACGGCTGCGGGAGC | 101 | 16392 | 16407 | 695 |
| 826277 | 808 | 823 | GCGACGGCTGCGGGAG | 52 | 16393 | 16408 | 696 |
| 826278 | 810 | 825 | TCGCGACGGCTGCGGG | 52 | 16395 | 16410 | 697 |
| 826291 | 834 | 849 | GGGTGCGGCAGAGTCC | 46 | 16419 | 16434 | 698 |
| 826292 | 858 | 873 | GGCGGGACCCTCAGGC | 37 | 16443 | 16458 | 699 |
| 826293 | 877 | 892 | ACGGGCCCCGTGAGGC | 85 | 16462 | 16477 | 700 |
| 826294 | 879 | 894 | CGACGGGCCCCGTGAG | 49 | 16464 | 16479 | 701 |
| 826295 | 882 | 897 | GCTCGACGGGCCCCGT | 27 | 16467 | 16482 | 702 |
| 826296 | 883 | 898 | GGCTCGACGGGCCCCG | 64 | 16468 | 16483 | 703 |
| 826297 | 889 | 904 | GCTACGGGCTCGACGG | 33 | 16474 | 16489 | 704 |
| 826298 | 891 | 906 | ACGCTACGGGCTCGAC | 35 | 16476 | 16491 | 705 |
| 826311 | 952 | 967 | GAAGCCGATCTTCCAG | 43 | 16537 | 16552 | 706 |
| 826312 | 953 | 968 | GGAAGCCGATCTTCCA | 64 | 16538 | 16553 | 707 |
| 826313 | 954 | 969 | TGGAAGCCGATCTTCC | 161 | 16539 | 16554 | 708 |
| 826314 | 956 | 971 | GCTGGAAGCCGATCTT | 80 | 16541 | 16556 | 709 |
| 826315 | 958 | 973 | CAGCTGGAAGCCGATC | 41 | 16543 | 16558 | 710 |
| 826316 | 968 | 983 | TCTGGTTGCACAGCTG | 38 | N/A | N/A | 711 |
| 826317 | 969 | 984 | TTCTGGTTGCACAGCT | 53 | N/A | N/A | 712 |
| 826318 | 970 | 985 | GTTCTGGTTGCACAGC | 19 | N/A | N/A | 713 |
| 826329 | 983 | 998 | AGCAGTCCGATTTGTT | 45 | 17769 | 17784 | 714 |
| 826330 | 985 | 1000 | GAAGCAGTCCGATTTG | 72 | 17771 | 17786 | 715 |
| 826331 | 986 | 1001 | AGAAGCAGTCCGATTT | 92 | 17772 | 17787 | 716 |
| 826332 | 987 | 1002 | TAGAAGCAGTCCGATT | 124 | 17773 | 17788 | 717 |
| 826333 | 988 | 1003 | GTAGAAGCAGTCCGAT | 50 | 17774 | 17789 | 718 |
| 826334 | 989 | 1004 | GGTAGAAGCAGTCCGA | 18 | 17775 | 17790 | 719 |
| 826335 | 994 | 1009 | TGTCTGGTAGAAGCAG | 25 | 17780 | 17795 | 720 |
| 826336 | 995 | 1010 | ATGTCTGGTAGAAGCA | 35 | 17781 | 17796 | 721 |
| 826349 | 1022 | 1037 | CCCTCACCGCATCCAC | 32 | 17808 | 17823 | 722 |
| 826350 | 1025 | 1040 | ACTCCCTCACCGCATC | 68 | 17811 | 17826 | 723 |
| 826351 | 1026 | 1041 | CACTCCCTCACCGCAT | 128 | 17812 | 17827 | 724 |
| 826352 | 1028 | 1043 | ACCACTCCCTCACCGC | 33 | 17814 | 17829 | 725 |
| 826353 | 1032 | 1047 | CGGTACCACTCCCTCA | 49 | 17818 | 17833 | 726 |
| 826354 | 1033 | 1048 | GCGGTACCACTCCCTC | 69 | 17819 | 17834 | 727 |
| 826355 | 1034 | 1049 | AGCGGTACCACTCCCT | 24 | 17820 | 17835 | 728 |
| 826356 | 1045 | 1060 | GATGTAGTGGAAGCGG | 36 | 17831 | 17846 | 729 |
| 826369 | 1123 | 1138 | GCGGCAGGCGAAGATG | 49 | 17909 | 17924 | 730 |
| 826370 | 1126 | 1141 | GAAGCGGCAGGCGAAG | 55 | 17912 | 17927 | 731 |
| 826371 | 1129 | 1144 | GTTGAAGCGGCAGGCG | 97 | 17915 | 17930 | 732 |
| 826372 | 1130 | 1145 | GGTTGAAGCGGCAGGC | 30 | 17916 | 17931 | 733 |
| 826373 | 1134 | 1149 | ACCTGGTTGAAGCGGC | 20 | 17920 | 17935 | 734 |
| 826374 | 1136 | 1151 | AGACCTGGTTGAAGCG | 44 | 17922 | 17937 | 735 |
| 826375 | 1138 | 1153 | GGAGACCTGGTTGAAG | 68 | 17924 | 17939 | 736 |
| 826376 | 1146 | 1161 | TGGTTGCAGGAGACCT | 143 | 17932 | 17947 | 737 |
| 826389 | 1232 | 1247 | AAGACATCCAGAGGTT | 80 | 24188 | 24203 | 738 |
| 826390 | 1250 | 1265 | TGTTGATTCCAGGCAT | 53 | 24206 | 24221 | 739 |
| 826391 | 1251 | 1266 | TTGTTGATTCCAGGCA | 43 | 24207 | 24222 | 740 |
| 826392 | 1252 | 1267 | GTTGTTGATTCCAGGC | 31 | 24208 | 24223 | 741 |
| 826393 | 1254 | 1269 | CCGTTGTTGATTCCAG | 15 | 24210 | 24225 | 742 |
| 826394 | 1255 | 1270 | ACCGTTGTTGATTCCA | 15 | 24211 | 24226 | 743 |
| 826395 | 1257 | 1272 | AGACCGTTGTTGATTC | 30 | N/A | N/A | 744 |
| 826396 | 1259 | 1274 | ACAGACCGTTGTTGAT | 33 | N/A | N/A | 745 |
| 826409 | 1285 | 1300 | ATTCTGCTCTGCGCGC | 39 | 24582 | 24597 | 746 |
| 826410 | 1286 | 1301 | CATTCTGCTCTGCGCG | 36 | 24583 | 24598 | 747 |
| 826411 | 1287 | 1302 | TCATTCTGCTCTGCGC | 80 | 24584 | 24599 | 748 |
| 826412 | 1323 | 1338 | CGGGCCCCAGTCACTG | 118 | 24620 | 24635 | 749 |
| 826413 | 1325 | 1340 | CCCGGGCCCCAGTCAC | 82 | 24622 | 24637 | 750 |
| 826414 | 1327 | 1342 | TACCCGGGCCCCAGTC | 31 | 24624 | 24639 | 751 |
| 826415 | 1329 | 1344 | ATTACCCGGGCCCCAG | 56 | 24626 | 24641 | 752 |
| 826416 | 1331 | 1346 | CCATTACCCGGGCCCC | 37 | 24628 | 24643 | 753 |
| 826429 | 1366 | 1381 | ATCATCCATAAAGGCA | 75 | 24663 | 24678 | 754 |
| 826430 | 1379 | 1394 | AGTTAAAGCCACCATC | 57 | 24676 | 24691 | 755 |
| 826431 | 1383 | 1398 | CGCAAGTTAAAGCCAC | 70 | 24680 | 24695 | 756 |
| 826432 | 1385 | 1400 | GCCGCAAGTTAAAGCC | 33 | 24682 | 24697 | 757 |
| 826433 | 1387 | 1402 | AGGCCGCAAGTTAAAG | 32 | 24684 | 24699 | 758 |
| 826434 | 1388 | 1403 | CAGGCCGCAAGTTAAA | 47 | 24685 | 24700 | 759 |
| 826435 | 1389 | 1404 | CCAGGCCGCAAGTTAA | 40 | 24686 | 24701 | 760 |
| 826436 | 1390 | 1405 | GCCAGGCCGCAAGTTA | 40 | 24687 | 24702 | 761 |
| 826449 | 1446 | 1461 | TAATCGCCCCCAAGTC | 35 | 25166 | 25181 | 762 |
| 826450 | 1447 | 1462 | ATAATCGCCCCCAAGT | 56 | 25167 | 25182 | 763 |
| 826451 | 1448 | 1463 | CATAATCGCCCCCAAG | 53 | 25168 | 25183 | 764 |
| 826452 | 1450 | 1465 | GCCATAATCGCCCCCA | 23 | 25170 | 25185 | 765 |
| 826453 | 1451 | 1466 | CGCCATAATCGCCCCC | 22 | 25171 | 25186 | 766 |
| 826454 | 1453 | 1468 | GTCGCCATAATCGCCC | 43 | 25173 | 25188 | 767 |
| 826455 | 1457 | 1472 | TGCAGTCGCCATAATC | 36 | 25177 | 25192 | 768 |
| 826456 | 1458 | 1473 | GTGCAGTCGCCATAAT | 38 | 25178 | 25193 | 769 |
| 826469 | 1528 | 1543 | GTGAATACACACCTGC | 98 | N/A | N/A | 770 |
| 826470 | 1530 | 1545 | GAGTGAATACACACCT | 47 | 25444 | 25459 | 771 |
| 826471 | 1531 | 1546 | GGAGTGAATACACACC | 128 | 25445 | 25460 | 772 |
| 826472 | 1534 | 1549 | GCAGGAGTGAATACAC | 106 | 25448 | 25463 | 773 |
| 826473 | 1553 | 1568 | TGATCATGCTCTCCTG | 25 | 25467 | 25482 | 774 |
| 826474 | 1554 | 1569 | TTGATCATGCTCTCCT | 31 | 25468 | 25483 | 775 |
| 826475 | 1556 | 1571 | CCTTGATCATGCTCTC | 28 | 25470 | 25485 | 776 |
| 826476 | 1557 | 1572 | TCCTTGATCATGCTCT | 23 | 25471 | 25486 | 777 |
| 826488 | 1583 | 1598 | GATAGAAGATGTAGGC | 38 | 25497 | 25512 | 778 |
| 826489 | 1584 | 1599 | GGATAGAAGATGTAGG | 36 | 25498 | 25513 | 779 |
| 826490 | 1585 | 1600 | CGGATAGAAGATGTAG | 101 | 25499 | 25514 | 780 |
| 826491 | 1587 | 1602 | CGCGGATAGAAGATGT | 33 | 25501 | 25516 | 781 |
| 826492 | 1588 | 1603 | CCGCGGATAGAAGATG | 69 | 25502 | 25517 | 782 |
| 826493 | 1589 | 1604 | GCCGCGGATAGAAGAT | 64 | 25503 | 25518 | 783 |
| 826494 | 1591 | 1606 | GGGCCGCGGATAGAAG | 48 | 25505 | 25520 | 784 |
| 826495 | 1612 | 1627 | GTCACAGTACTCCACG | 27 | 25526 | 25541 | 785 |
| 826508 | 1669 | 1684 | GGAGAAGTCAACCTGG | 21 | 30615 | 30630 | 786 |
| 826509 | 1675 | 1690 | GTCTGAGGAGAAGTCA | 43 | 30621 | 30636 | 787 |
| 826510 | 1696 | 1711 | CTTGGTGAAACAGCCC | 159 | 30642 | 30657 | 788 |
| 826511 | 1702 | 1717 | CCGGCACTTGGTGAAA | 123 | 30648 | 30663 | 789 |
| 826512 | 1708 | 1723 | TGGCTTCCGGCACTTG | 36 | 30654 | 30669 | 790 |
| 826513 | 1709 | 1724 | ATGGCTTCCGGCACTT | 26 | 30655 | 30670 | 791 |
| 826514 | 1711 | 1726 | GCATGGCTTCCGGCAC | 15 | 30657 | 30672 | 792 |
| 826515 | 1716 | 1731 | ACGCTGCATGGCTTCC | 44 | N/A | N/A | 793 |
| 826555 | 1876 | 1891 | TTTGTAGTTCAGCTCC | 67 | 31232 | 31247 | 794 |
| 826568 | 2001 | 2016 | AGGTCAAAGACGAGCT | 76 | 31830 | 31845 | 795 |
| 826569 | 2002 | 2017 | CAGGTCAAAGACGAGC | 28 | 31831 | 31846 | 796 |
| 826570 | 2003 | 2018 | GCAGGTCAAAGACGAG | 103 | 31832 | 31847 | 797 |
| 826571 | 2009 | 2024 | TGACCAGCAGGTCAAA | 148 | 31838 | 31853 | 798 |
| 826572 | 2011 | 2026 | GATGACCAGCAGGTCA | 170 | 31840 | 31855 | 799 |
| 826573 | 2032 | 2047 | TCGGAGCAGCATGAGG | 61 | 31861 | 31876 | 800 |
| 826574 | 2034 | 2049 | CTTCGGAGCAGCATGA | 52 | 31863 | 31878 | 801 |
| 826575 | 2035 | 2050 | CCTTCGGAGCAGCATG | 44 | 31864 | 31879 | 802 |
| 826587 | 2049 | 2064 | TATCGGCTTCGGAACC | 28 | 31878 | 31893 | 803 |
| 826588 | 2050 | 2065 | GTATCGGCTTCGGAAC | 50 | 31879 | 31894 | 804 |
| 826589 | 2051 | 2066 | AGTATCGGCTTCGGAA | 28 | 31880 | 31895 | 805 |
| 826590 | 2053 | 2068 | CCAGTATCGGCTTCGG | 37 | 31882 | 31897 | 806 |
| 826591 | 2054 | 2069 | ACCAGTATCGGCTTCG | 23 | 31883 | 31898 | 807 |
| 826592 | 2055 | 2070 | GACCAGTATCGGCTTC | 32 | 31884 | 31899 | 808 |
| 826593 | 2056 | 2071 | AGACCAGTATCGGCTT | 20 | 31885 | 31900 | 809 |
| 826594 | 2058 | 2073 | GGAGACCAGTATCGGC | 25 | 31887 | 31902 | 810 |
| 826607 | 2282 | 2297 | AGGGCCCCCCCAGAGG | 90 | 32111 | 32126 | 811 |
| 826608 | 2284 | 2299 | TCAGGGCCCCCCCAGA | 55 | 32113 | 32128 | 812 |
| 826609 | 2308 | 2323 | GTGTGAGAAACCTCTC | 64 | 32137 | 32152 | 813 |
| 826610 | 2310 | 2325 | TGGTGTGAGAAACCTC | 81 | 32139 | 32154 | 814 |
| 826611 | 2313 | 2328 | CCTTGGTGTGAGAAAC | 93 | 32142 | 32157 | 815 |
| 826612 | 2314 | 2329 | GCCTTGGTGTGAGAAA | 52 | 32143 | 32158 | 816 |
| 826613 | 2315 | 2330 | TGCCTTGGTGTGAGAA | 31 | 32144 | 32159 | 817 |
| 826614 | 2316 | 2331 | CTGCCTTGGTGTGAGA | 30 | 32145 | 32160 | 818 |
| 826627 | 2399 | 2414 | ACGGCAGTTTGGGCGG | 34 | 32228 | 32243 | 819 |
| 826628 | 2400 | 2415 | AACGGCAGTTTGGGCG | 93 | 32229 | 32244 | 820 |
| 826629 | 2401 | 2416 | CAACGGCAGTTTGGGC | 87 | 32230 | 32245 | 821 |
| 826630 | 2403 | 2418 | ATCAACGGCAGTTTGG | 60 | 32232 | 32247 | 822 |
| 826631 | 2405 | 2420 | ACATCAACGGCAGTTT | 25 | 32234 | 32249 | 823 |
| 826632 | 2407 | 2422 | ACACATCAACGGCAGT | 19 | 32236 | 32251 | 824 |
| 826633 | 2408 | 2423 | CACACATCAACGGCAG | 38 | 32237 | 32252 | 825 |
| 826634 | 2410 | 2425 | TCCACACATCAACGGC | 49 | 32239 | 32254 | 826 |
| 826647 | 2491 | 2506 | GGAGCCAAGGCACTTC | 30 | 32320 | 32335 | 827 |
| 826648 | 2492 | 2507 | TGGAGCCAAGGCACTT | 31 | 32321 | 32336 | 828 |
| 826649 | 2502 | 2517 | GGTACAGGGCTGGAGC | 117 | 32331 | 32346 | 829 |
| 826650 | 2520 | 2535 | TCAGAGGCAGTACCAA | 48 | 32349 | 32364 | 830 |
| 826651 | 2523 | 2538 | TGTTCAGAGGCAGTAC | 38 | 32352 | 32367 | 831 |
| 826652 | 2533 | 2548 | GAAACCAGAGTGTTCA | 52 | 32362 | 32377 | 832 |
| 826653 | 2551 | 2566 | TAGCCGCAGTTGGGTG | 49 | 32380 | 32395 | 833 |
| 826654 | 2552 | 2567 | TTAGCCGCAGTTGGGT | 28 | 32381 | 32396 | 834 |
| 826665 | 2579 | 2594 | CTTGGCTGATCCAAGG | 33 | 32408 | 32423 | 835 |
| 826666 | 2580 | 2595 | GCTTGGCTGATCCAAG | 69 | 32409 | 32424 | 836 |
| 826667 | 2581 | 2596 | CGCTTGGCTGATCCAA | 66 | 32410 | 32425 | 837 |
| 826668 | 2582 | 2597 | TCGCTTGGCTGATCCA | 10 | 32411 | 32426 | 838 |
| 826669 | 2583 | 2598 | TTCGCTTGGCTGATCC | 33 | 32412 | 32427 | 839 |
| 826670 | 2584 | 2599 | TTTCGCTTGGCTGATC | 43 | 32413 | 32428 | 840 |
| 826671 | 2585 | 2600 | GTTTCGCTTGGCTGAT | 24 | 32414 | 32429 | 841 |
| 826672 | 2586 | 2601 | AGTTTCGCTTGGCTGA | 39 | 32415 | 32430 | 842 |
| 826685 | 2623 | 2638 | CAGCGGTTTCTTAGGA | 27 | 32452 | 32467 | 843 |
| 826686 | 2625 | 2640 | ATCAGCGGTTTCTTAG | 45 | 32454 | 32469 | 844 |
| 826687 | 2627 | 2642 | TTATCAGCGGTTTCTT | 18 | 32456 | 32471 | 845 |
| 826688 | 2629 | 2644 | GGTTATCAGCGGTTTC | 33 | 32458 | 32473 | 846 |
| 826689 | 2632 | 2647 | CCTGGTTATCAGCGGT | 29 | 32461 | 32476 | 847 |
| 826690 | 2634 | 2649 | GTCCTGGTTATCAGCG | 19 | 32463 | 32478 | 848 |
| 826691 | 2636 | 2651 | TTGTCCTGGTTATCAG | 36 | 32465 | 32480 | 849 |
| 826692 | 2652 | 2667 | TACCCTTGGTTGTGTT | 39 | 32481 | 32496 | 850 |
| 826705 | 2692 | 2707 | TAAGCCGTCGCTGGGC | 51 | 32521 | 32536 | 851 |
| 826706 | 2693 | 2708 | TTAAGCCGTCGCTGGG | 63 | 32522 | 32537 | 852 |
| 826707 | 2696 | 2711 | GGCTTAAGCCGTCGCT | 58 | 32525 | 32540 | 853 |
| 826708 | 2698 | 2713 | CTGGCTTAAGCCGTCG | 31 | 32527 | 32542 | 854 |
| 826709 | 2700 | 2715 | GGCTGGCTTAAGCCGT | 131 | 32529 | 32544 | 855 |
| 826710 | 2701 | 2716 | GGGCTGGCTTAAGCCG | 92 | 32530 | 32545 | 856 |
| 826711 | 2734 | 2749 | GCTACTGGAGAGCAGT | 20 | 32563 | 32578 | 857 |
| 826712 | 2735 | 2750 | TGCTACTGGAGAGCAG | 53 | 32564 | 32579 | 858 |
| 826725 | 2846 | 2861 | TCTGCTCTAGCCCTAG | 53 | 32675 | 32690 | 859 |
| 826726 | 2847 | 2862 | GTCTGCTCTAGCCCTA | 32 | 32676 | 32691 | 860 |
| 826727 | 2850 | 2865 | CGGGTCTGCTCTAGCC | 107 | 32679 | 32694 | 861 |
| 826728 | 2852 | 2867 | CCCGGGTCTGCTCTAG | 66 | 32681 | 32696 | 862 |
| 826729 | 2854 | 2869 | TACCCGGGTCTGCTCT | 92 | 32683 | 32698 | 863 |
| 826730 | 2855 | 2870 | TTACCCGGGTCTGCTC | 52 | 32684 | 32699 | 864 |
| 826731 | 2856 | 2871 | CTTACCCGGGTCTGCT | 51 | 32685 | 32700 | 865 |
| 826732 | 2858 | 2873 | TACTTACCCGGGTCTG | 38 | 32687 | 32702 | 866 |
| 826745 | 2954 | 2969 | AGACATGTAGAGGTAT | 16 | 32783 | 32798 | 867 |
| 826746 | 2955 | 2970 | CAGACATGTAGAGGTA | 8 | 32784 | 32799 | 868 |
| 826747 | 2959 | 2974 | CAAGCAGACATGTAGA | 32 | 32788 | 32803 | 869 |
| 826748 | 2960 | 2975 | TCAAGCAGACATGTAG | 25 | 32789 | 32804 | 870 |
| 826749 | 2961 | 2976 | CTCAAGCAGACATGTA | 22 | 32790 | 32805 | 871 |
| 826750 | 2963 | 2978 | ATCTCAAGCAGACATG | 50 | 32792 | 32807 | 872 |
| 826751 | 2964 | 2979 | TATCTCAAGCAGACAT | 26 | 32793 | 32808 | 873 |
| 826752 | 2965 | 2980 | ATATCTCAAGCAGACA | 27 | 32794 | 32809 | 874 |
| 826764 | 3016 | 3031 | ATGCATAGGAGTTCTC | 17 | 32845 | 32860 | 875 |
| 826765 | 3017 | 3032 | GATGCATAGGAGTTCT | 23 | 32846 | 32861 | 876 |
| 826766 | 3019 | 3034 | GGGATGCATAGGAGTT | 42 | 32848 | 32863 | 877 |
| 826767 | 3021 | 3036 | AAGGGATGCATAGGAG | 61 | 32850 | 32865 | 878 |
| 826768 | 3022 | 3037 | TAAGGGATGCATAGGA | 41 | 32851 | 32866 | 879 |
| 826769 | 3023 | 3038 | CTAAGGGATGCATAGG | 37 | 32852 | 32867 | 880 |
| 826770 | 3024 | 3039 | TCTAAGGGATGCATAG | 34 | 32853 | 32868 | 881 |
| 826771 | 3026 | 3041 | GTTCTAAGGGATGCAT | 25 | 32855 | 32870 | 882 |
| 826784 | 3121 | 3136 | TGTGCTACGGGAGCCC | 17 | 32950 | 32965 | 883 |
| 826785 | 3122 | 3137 | GTGTGCTACGGGAGCC | 10 | 32951 | 32966 | 884 |
| 826786 | 3123 | 3138 | AGTGTGCTACGGGAGC | 59 | 32952 | 32967 | 885 |
| 826787 | 3124 | 3139 | TAGTGTGCTACGGGAG | 12 | 32953 | 32968 | 886 |
| 826788 | 3125 | 3140 | ATAGTGTGCTACGGGA | 44 | 32954 | 32969 | 887 |
| 826789 | 3126 | 3141 | TATAGTGTGCTACGGG | 46 | 32955 | 32970 | 888 |
| 826790 | 3128 | 3143 | GTTATAGTGTGCTACG | 23 | 32957 | 32972 | 889 |
| 826803 | 3153 | 3168 | GTGCAACAGCAACACT | 67 | 32982 | 32997 | 890 |
| 826804 | 3154 | 3169 | GGTGCAACAGCAACAC | 37 | 32983 | 32998 | 891 |
| 826805 | 3155 | 3170 | TGGTGCAACAGCAACA | 64 | 32984 | 32999 | 892 |
| 826806 | 3156 | 3171 | ATGGTGCAACAGCAAC | 10 | 32985 | 33000 | 893 |
| 826807 | 3157 | 3172 | TATGGTGCAACAGCAA | 20 | 32986 | 33001 | 894 |
| 826808 | 3158 | 3173 | GTATGGTGCAACAGCA | 20 | 32987 | 33002 | 895 |
| 826809 | 3159 | 3174 | AGTATGGTGCAACAGC | 4 | 32988 | 33003 | 896 |
| 826821 | 3216 | 3231 | CCCTGACCGCAAGGCA | 16 | 33045 | 33060 | 897 |
| 826822 | 3217 | 3232 | TCCCTGACCGCAAGGC | 51 | 33046 | 33061 | 898 |
| 826823 | 3218 | 3233 | GTCCCTGACCGCAAGG | 35 | 33047 | 33062 | 899 |
| 826824 | 3219 | 3234 | AGTCCCTGACCGCAAG | 34 | 33048 | 33063 | 900 |
| 826825 | 3220 | 3235 | CAGTCCCTGACCGCAA | 33 | 33049 | 33064 | 901 |
| 826826 | 3222 | 3237 | TTCAGTCCCTGACCGC | 23 | 33051 | 33066 | 902 |
| 826827 | 3223 | 3238 | ATTCAGTCCCTGACCG | 69 | 33052 | 33067 | 903 |
| 826828 | 3225 | 3240 | AGATTCAGTCCCTGAC | 14 | 33054 | 33069 | 904 |
| 826840 | 3239 | 3254 | TACATAAACGGGCAAG | 50 | 33068 | 33083 | 905 |
| 826841 | 3242 | 3257 | GCATACATAAACGGGC | 61 | 33071 | 33086 | 906 |
| 826842 | 3244 | 3259 | GAGCATACATAAACGG | 59 | 33073 | 33088 | 907 |
| 826843 | 3249 | 3264 | ACATGGAGCATACATA | 94 | 33078 | 33093 | 908 |
| 826844 | 3250 | 3265 | GACATGGAGCATACAT | 42 | 33079 | 33094 | 909 |
| 826845 | 3251 | 3266 | AGACATGGAGCATACA | 81 | 33080 | 33095 | 910 |
| 826846 | 3253 | 3268 | CTAGACATGGAGCATA | 69 | 33082 | 33097 | 911 |
| 826847 | 3254 | 3269 | GCTAGACATGGAGCAT | 47 | 33083 | 33098 | 912 |
| 826860 | N/A | N/A | TGATACCTCCCCTTGG | 78 | 2720 | 2735 | 913 |
| 826861 | N/A | N/A | ATGATACCTCCCCTTG | 84 | 2721 | 2736 | 914 |
| 826862 | N/A | N/A | GCTCATGATACCTCCC | 176 | 2725 | 2740 | 915 |
| 826863 | N/A | N/A | ACTGCTCATGATACCT | 95 | 2728 | 2743 | 916 |
| 826864 | N/A | N/A | ATACTGCTCATGATAC | 59 | 2730 | 2745 | 917 |
| 826865 | N/A | N/A | GATACTGCTCATGATA | 87 | 2731 | 2746 | 918 |
| 826866 | N/A | N/A | CTTGATACTGCTCATG | 96 | 2734 | 2749 | 919 |
| 826867 | N/A | N/A | CCTTGATACTGCTCAT | 79 | 2735 | 2750 | 920 |
| 826880 | N/A | N/A | CGAGTTTTGTCCTAGC | 7 | 4876 | 4891 | 921 |
| 826881 | N/A | N/A | TCGAGTTTTGTCCTAG | 30 | 4877 | 4892 | 922 |
| 826882 | N/A | N/A | CTTTCGAGTTTTGTCC | 86 | 4880 | 4895 | 923 |
| 826883 | N/A | N/A | CACCTTTCGAGTTTTG | 30 | 4883 | 4898 | 924 |
| 826884 | N/A | N/A | GCCACCTTTCGAGTTT | 50 | 4885 | 4900 | 925 |
| 826885 | N/A | N/A | GGGCCACCTTTCGAGT | 21 | 4887 | 4902 | 926 |
| 826886 | N/A | N/A | TAGGGCCACCTTTCGA | 20 | 4889 | 4904 | 927 |
| 826887 | N/A | N/A | ATAGGGCCACCTTTCG | 27 | 4890 | 4905 | 928 |
| 826900 | N/A | N/A | GCCGGAGCTGGGCTTC | 55 | 4935 | 4950 | 929 |
| 826901 | N/A | N/A | TGCCGGAGCTGGGCTT | 82 | 4936 | 4951 | 930 |
| 826902 | N/A | N/A | GTGCCGGAGCTGGGCT | 179 | 4937 | 4952 | 931 |
| 826903 | N/A | N/A | AAGTGCCGGAGCTGGG | 31 | 4939 | 4954 | 932 |
| 826904 | N/A | N/A | AAAAGTGCCGGAGCTG | 44 | 4941 | 4956 | 933 |
| 826905 | N/A | N/A | CCAAAAGTGCCGGAGC | 34 | 4943 | 4958 | 934 |
| 826906 | N/A | N/A | GCCAAAAGTGCCGGAG | 19 | 4944 | 4959 | 935 |
| 826907 | N/A | N/A | GGCCAAAAGTGCCGGA | 38 | 4945 | 4960 | 936 |
| 826920 | N/A | N/A | CCCCTGGAACCCGAGT | 31 | 5065 | 5080 | 937 |
| 826921 | N/A | N/A | CACCCCTGGAACCCGA | 38 | 5067 | 5082 | 938 |
| 826922 | N/A | N/A | CCCGGAGTGGATTGGG | 185 | 5138 | 5153 | 939 |
| 826923 | N/A | N/A | GCCCCGGAGTGGATTG | 76 | 5140 | 5155 | 940 |
| 826924 | N/A | N/A | GAGCCCCGGAGTGGAT | 64 | 5142 | 5157 | 941 |
| 826925 | N/A | N/A | ATGAGCCCCGGAGTGG | 28 | 5144 | 5159 | 942 |
| 826926 | N/A | N/A | TTCATGAGCCCCGGAG | 42 | 5147 | 5162 | 943 |
| 826927 | N/A | N/A | CCTTCATGAGCCCCGG | 29 | 5149 | 5164 | 944 |
| 826940 | N/A | N/A | TGCTTACCTTGATACT | 152 | 2741 | 2756 | 945 |
| 826941 | N/A | N/A | CCAAACCAGGTTCCCT | 104 | 2757 | 2772 | 946 |
| 826942 | N/A | N/A | AGCCGGTGTCAACCAG | 187 | 2777 | 2792 | 947 |
| 826943 | N/A | N/A | AAAGTGAAAGCCGGTG | 138 | 2785 | 2800 | 948 |
| 826944 | N/A | N/A | TGCGACTTCTTAAAGT | 97 | 2796 | 2811 | 949 |
| 826945 | N/A | N/A | GCTCAGGGTCCAACCT | 79 | 2844 | 2859 | 950 |
| 826946 | N/A | N/A | AGCAAGGAGTTTAGCA | 95 | 2889 | 2904 | 951 |
| 826947 | N/A | N/A | CATAAGAGCCAAGGGC | 142 | 2983 | 2998 | 952 |
| 826960 | N/A | N/A | CGTTGATGGGCTATAT | 168 | 3408 | 3423 | 953 |
| 826961 | N/A | N/A | CGCCTAGACAGGCCCT | 61 | 3440 | 3455 | 954 |
| 826962 | N/A | N/A | ACGCAGGACACTGTGG | 90 | 3555 | 3570 | 955 |
| 826963 | N/A | N/A | AGGCAGCGCGAGGGCC | 109 | 3571 | 3586 | 956 |
| 826964 | N/A | N/A | GTGTAATCGCCCCTGC | 84 | 3622 | 3637 | 957 |
| 826965 | N/A | N/A | GGCCCTAGGACATTCT | 73 | 3674 | 3689 | 958 |
| 826966 | N/A | N/A | GTCCAGACCCGGGAGG | 66 | 3718 | 3733 | 959 |
| 826967 | N/A | N/A | GGGAGCAGCGCACTCA | 106 | 3804 | 3819 | 960 |
| 826980 | N/A | N/A | GGGACTAACCGACCTG | 146 | 5631 | 5646 | 961 |
| 826981 | N/A | N/A | TTCCAGGCGCAGGCAC | 76 | 5662 | 5677 | 962 |
| 826982 | N/A | N/A | CAGTAAGCTGGAGGCT | 181 | 5785 | 5800 | 963 |
| 826983 | N/A | N/A | CGCCAGTCCAGTAAGC | 137 | 5793 | 5808 | 964 |
| 826984 | N/A | N/A | GCTAGGATGGCTCCAC | 59 | 5819 | 5834 | 965 |
| 826985 | N/A | N/A | CCACACTCTGGGTGAG | 42 | 5843 | 5858 | 966 |
| 826986 | N/A | N/A | GGGCAATGCTGCTCCA | 76 | 5863 | 5878 | 967 |
| 826987 | N/A | N/A | TCCCACTTGCAGGAGG | 91 | 5919 | 5934 | 968 |
| 827000 | N/A | N/A | TCCCAAGGTGTGGCAT | 44 | 6462 | 6477 | 969 |
| 827001 | N/A | N/A | TTGAAGCAGGTGTTCC | 60 | 6475 | 6490 | 970 |
| 827002 | N/A | N/A | TGCCAGGTGCCTAGCC | 55 | 6502 | 6517 | 971 |
| 827003 | N/A | N/A | CAATAAAGGGCTTATG | 94 | 6538 | 6553 | 972 |
| 827004 | N/A | N/A | AACTACCTGGCCTTCA | 63 | 6552 | 6567 | 973 |
| 827005 | N/A | N/A | GGCTTATATGCCTGTC | 77 | 6605 | 6620 | 974 |
| 827006 | N/A | N/A | TGCCACAGTTACTGGC | 80 | 6618 | 6633 | 975 |
| 827007 | N/A | N/A | ACTTATCCCAGTGTGC | 30 | 6631 | 6646 | 976 |
| 827020 | N/A | N/A | AGGAAATGGTCCCTAC | 70 | 6912 | 6927 | 977 |
| 827021 | N/A | N/A | GTGCACACGGCAGCTT | 77 | 6932 | 6947 | 978 |
| 827022 | N/A | N/A | CCCAAGACACCTTCGC | 55 | 6955 | 6970 | 979 |
| 827023 | N/A | N/A | TAGCACCGGGCTTGTA | 62 | 6994 | 7009 | 980 |
| 827024 | N/A | N/A | AACAGGATGAGTCACA | 26 | 7088 | 7103 | 981 |
| 827025 | N/A | N/A | AGTTTTGGGATTAGGC | 51 | 7107 | 7122 | 982 |
| 827026 | N/A | N/A | GGCGGAAGCCACATCT | 61 | 7178 | 7193 | 983 |
| 827027 | N/A | N/A | TGAAATGAGGCGGAAG | 117 | 7186 | 7201 | 984 |
| 827040 | N/A | N/A | GGGAATAATACTGCCC | 115 | 7751 | 7766 | 985 |
| 827041 | N/A | N/A | AATGTATGTTCCCTTG | 34 | 7816 | 7831 | 986 |
| 827042 | N/A | N/A | GTAAAAAGTCTGGCCC | 34 | 8222 | 8237 | 987 |
| 827043 | N/A | N/A | TCCAAGGTGTGTTGTG | 35 | 8283 | 8298 | 988 |
| 827044 | N/A | N/A | CATGAGACCTACTTCC | 30 | 8296 | 8311 | 989 |
| 827045 | N/A | N/A | ATAAGAGTCATCATGA | 54 | 8307 | 8322 | 990 |
| 827046 | N/A | N/A | GGTGAGGGTGGACGGT | 86 | 8444 | 8459 | 991 |
| 827047 | N/A | N/A | GGCTTTCCATTGGAGC | 64 | 8483 | 8498 | 992 |
| 827060 | N/A | N/A | CCTCAGCAGGTAGGCA | 45 | 8836 | 8851 | 993 |
| 827061 | N/A | N/A | TCGGACTCAGCACTTC | 75 | 8961 | 8976 | 994 |
| 827062 | N/A | N/A | CTGCAGTGGCCAACCC | 98 | 8983 | 8998 | 995 |
| 827063 | N/A | N/A | CTGTAGGTATGACTGG | 31 | 9047 | 9062 | 996 |
| 827064 | N/A | N/A | TTCCATGACTGTAGGT | 24 | 9055 | 9070 | 997 |
| 827065 | N/A | N/A | GCCTAAACCGTTCCTG | 53 | 9105 | 9120 | 998 |
| 827066 | N/A | N/A | TTCAAGAACCCCAAGT | 50 | 9132 | 9147 | 999 |
| 827067 | N/A | N/A | AGAAGCTACCATGACC | 66 | 9158 | 9173 | 1000 |
| 827080 | N/A | N/A | GGCCTATCAACTAGGC | 154 | 9783 | 9798 | 1001 |
| 827081 | N/A | N/A | CACAATTCCATCGGGC | 22 | 9837 | 9852 | 1002 |
| 827082 | N/A | N/A | CCCTACATTGGAGGGT | 188 | 9866 | 9881 | 1003 |
| 827083 | N/A | N/A | AGGGATAAAGAATGCC | 57 | 9978 | 9993 | 1004 |
| 827084 | N/A | N/A | GACCAGCGGCTGGAGG | 46 | 9996 | 10011 | 1005 |
| 827085 | N/A | N/A | AGACATCCGATCTTGT | 42 | 10020 | 10035 | 1006 |
| 827086 | N/A | N/A | TGACACCTAGAGCTAA | 60 | 10068 | 10083 | 1007 |
| 827087 | N/A | N/A | GGCAGAGCCTTTGAGT | 58 | 10084 | 10099 | 1008 |
| 827100 | N/A | N/A | TACGCACCTCCCTCCT | 41 | 10649 | 10664 | 1009 |
| | | | | | 10672 | 10687 | |
| 827101 | N/A | N/A | CTACGCACCTCCCTCC | 128 | 10650 | 10665 | 1010 |
| | | | | | 10673 | 10688 | |
| 827102 | N/A | N/A | CCCTACGCACCTCCCT | 88 | 10652 | 10667 | 1011 |
| | | | | | 10675 | 10690 | |
| 827103 | N/A | N/A | ACCCTACGCACCTCCC | 34 | 10653 | 10668 | 1012 |
| | | | | | 10676 | 10691 | |
| 827104 | N/A | N/A | CCACCCTACGCACCTC | 36 | 10655 | 10670 | 1013 |
| | | | | | 10678 | 10693 | |
| 827105 | N/A | N/A | GCCACCCTACGCACCT | 40 | 10656 | 10671 | 1014 |
| | | | | | 10679 | 10694 | |
| 827106 | N/A | N/A | CTGCCACCCTACGCAC | 47 | 10658 | 10673 | 1015 |
| | | | | | 10681 | 10696 | |
| 827107 | N/A | N/A | CCTGCCACCCTACGCA | 40 | 10659 | 10674 | 1016 |
| | | | | | 10682 | 10697 | |
| 827120 | N/A | N/A | CCACATGGTGCCCCAG | 61 | 11248 | 11263 | 1017 |
| 827121 | N/A | N/A | TTTTAGGAGGGCCACA | 126 | 11259 | 11274 | 1018 |
| 827122 | N/A | N/A | GCCCTCTGGTCCGTCC | 87 | 11291 | 11306 | 1019 |
| 827123 | N/A | N/A | GGTCAGACAGCACTCC | 33 | 11319 | 11334 | 1020 |
| 827124 | N/A | N/A | AGCTAGCAAATGGGTC | 82 | 11331 | 11346 | 1021 |
| 827125 | N/A | N/A | TTCCAGTTGGCACAGC | 42 | 11344 | 11359 | 1022 |
| 827126 | N/A | N/A | CACAATTGTCATTCCC | 22 | 11395 | 11410 | 1023 |
| 827127 | N/A | N/A | TGTTAGCTAACACAAT | 48 | 11405 | 11420 | 1024 |
| 827140 | N/A | N/A | CCCACAGAAAACGGAA | 40 | 11690 | 11705 | 1025 |
| 827141 | N/A | N/A | GGCTGCTGCATGATTC | 24 | 11738 | 11753 | 1026 |
| 827142 | N/A | N/A | ACCAGAATAGATTCAC | 108 | 11766 | 11781 | 1027 |
| 827143 | N/A | N/A | TCGAATCGAGTGCCCC | 35 | 11791 | 11806 | 1028 |
| 827144 | N/A | N/A | AACAATGAACCTCGAA | 98 | 11802 | 11817 | 1029 |
| 827145 | N/A | N/A | TGGTATTAGAATGTAC | 29 | 11881 | 11896 | 1030 |
| 827146 | N/A | N/A | GTGGTATTAGAATGTA | 41 | 11882 | 11897 | 1031 |
| 827147 | N/A | N/A | TGTGGTATTAGAATGT | 23 | 11883 | 11898 | 1032 |
| 827160 | N/A | N/A | GTGCAGGGTCTTACTT | 55 | 12230 | 12245 | 1033 |
| 827161 | N/A | N/A | AAATACCAGTGCAGGG | 73 | 12238 | 12253 | 1034 |
| 827162 | N/A | N/A | GTACATCAATTATGCC | 47 | 12268 | 12283 | 1035 |
| 827163 | N/A | N/A | GGGCACTCAAGATTTG | 52 | 12295 | 12310 | 1036 |
| 827164 | N/A | N/A | CAAACCTGAGTGGGCA | 43 | 12306 | 12321 | 1037 |
| 827165 | N/A | N/A | CTCGACTGTCAAACCT | 50 | 12315 | 12330 | 1038 |
| 827166 | N/A | N/A | GTTCAACATCTCGACT | 44 | 12324 | 12339 | 1039 |
| 827167 | N/A | N/A | GTAATGGGAGTGTTCA | 18 | 12335 | 12350 | 1040 |
| 827180 | N/A | N/A | GTTGAAGGTGTGTGTT | 35 | 13095 | 13110 | 1041 |
| 827181 | N/A | N/A | AGCAACTCAAAGGTGT | 38 | 13111 | 13126 | 1042 |
| 827182 | N/A | N/A | AGATTTGTACATGAGG | 78 | 13481 | 13496 | 1043 |
| 827183 | N/A | N/A | ACCCGAAACACATTAG | 66 | 13504 | 13519 | 1044 |
| 827184 | N/A | N/A | GTTTAGGCCGCACCCG | 27 | 13515 | 13530 | 1045 |
| 827185 | N/A | N/A | ATTTACGGTGTTTAGG | 61 | 13524 | 13539 | 1046 |
| 827186 | N/A | N/A | GGGATTTACAGTGAGC | 40 | 13548 | 13563 | 1047 |
| 827187 | N/A | N/A | AAAGCATATGCCCCCA | 26 | 13678 | 13693 | 1048 |
| 827200 | N/A | N/A | AACCGTATGTAGTAGG | 27 | 14153 | 14168 | 1049 |
| 827201 | N/A | N/A | CAACCGTATGTAGTAG | 53 | 14154 | 14169 | 1050 |
| 827202 | N/A | N/A | ACAACCGTATGTAGTA | 39 | 14155 | 14170 | 1051 |
| 827203 | N/A | N/A | AACAACCGTATGTAGT | 50 | 14156 | 14171 | 1052 |
| 827204 | N/A | N/A | GAACAACCGTATGTAG | 53 | 14157 | 14172 | 1053 |
| 827205 | N/A | N/A | AGAACAACCGTATGTA | 43 | 14158 | 14173 | 1054 |
| 827206 | N/A | N/A | TAGAACAACCGTATGT | 46 | 14159 | 14174 | 1055 |
| 827219 | N/A | N/A | TGACATACTGCTTCTA | 54 | 14642 | 14657 | 1056 |
| 827220 | N/A | N/A | CCCCAGCAGGTATTTT | 156 | 14667 | 14682 | 1057 |
| 827221 | N/A | N/A | CCCAAGCAATCACCAG | 120 | 14737 | 14752 | 1058 |
| 827222 | N/A | N/A | GACCAAAAGTGTGCCA | 45 | 14831 | 14846 | 1059 |
| 827223 | N/A | N/A | GACACAATCGCCGCTC | 114 | 14905 | 14920 | 1060 |
| 827224 | N/A | N/A | GAATAAGTGGAGATAT | 55 | 15017 | 15032 | 1061 |
| 827225 | N/A | N/A | TGCATTTCCGTCTCAA | 21 | 15204 | 15219 | 1062 |
| 827226 | N/A | N/A | GGGTATCGAGACCACC | 116 | 15441 | 15456 | 1063 |
| 827239 | N/A | N/A | CCGGACCTAGAAGGGA | 117 | 15987 | 16002 | 1064 |
| 827240 | N/A | N/A | GGCCACGGCGAGCCCA | 153 | 16080 | 16095 | 1065 |
| 827241 | N/A | N/A | GTAAACAGGTGTGTCC | 63 | 16110 | 16125 | 1066 |
| 827242 | N/A | N/A | CTGGAGCGAGTGTCTG | 165 | 16238 | 16253 | 1067 |
| 827243 | N/A | N/A | GCGGAGCCCATGGGTG | 73 | 16616 | 16631 | 1068 |
| 827244 | N/A | N/A | TGTCACTGGGCTGCGC | 60 | 16650 | 16665 | 1069 |
| 827245 | N/A | N/A | CCGCGAGCCCACGAGG | 54 | 16676 | 16691 | 1070 |
| 827246 | N/A | N/A | CACCAAGAGGTGTTAT | 54 | 16738 | 16753 | 1071 |
| 827259 | N/A | N/A | ATTTATACCTCCCCTG | 101 | 17495 | 17510 | 1072 |
| 827260 | N/A | N/A | CACACACGGTTTTGGT | 18 | 17513 | 17528 | 1073 |
| 827261 | N/A | N/A | GACCAGTAGCTGCACA | 72 | 17527 | 17542 | 1074 |
| 827262 | N/A | N/A | ATTAAGGGAGTTGCAG | 106 | 17555 | 17570 | 1075 |
| 827263 | N/A | N/A | CCCTAGGAGCATGGAC | 56 | 17585 | 17600 | 1076 |
| 827264 | N/A | N/A | GCAGAAGTCCCTAGGA | 92 | 17593 | 17608 | 1077 |
| 827265 | N/A | N/A | ACAGGAGTCGGAAGCC | 48 | 17640 | 17655 | 1078 |
| 827266 | N/A | N/A | GGGATAAGCCCCTTGG | 87 | 17705 | 17720 | 1079 |
| 827279 | N/A | N/A | AGATCCATGCTTCCAG | 17 | 18216 | 18231 | 1080 |
| 827280 | N/A | N/A | AAGATCCATGCTTCCA | 11 | 18217 | 18232 | 1081 |
| 827281 | N/A | N/A | CCAAGATCCATGCTTC | 22 | 18219 | 18234 | 1082 |
| 827282 | N/A | N/A | ACCAAGATCCATGCTT | 55 | 18220 | 18235 | 1083 |
| 827283 | N/A | N/A | GACCAAGATCCATGCT | 17 | 18221 | 18236 | 1084 |
| 827284 | N/A | N/A | AGACCAAGATCCATGC | 12 | 18222 | 18237 | 1085 |
| 827285 | N/A | N/A | AAGACCAAGATCCATG | 19 | 18223 | 18238 | 1086 |
| 827298 | N/A | N/A | AGGATGATGTGATACA | 30 | 18735 | 18750 | 1087 |
| 827299 | N/A | N/A | AAGGATGATGTGATAC | 74 | 18736 | 18751 | 1088 |
| 827300 | N/A | N/A | ATCTAAGAAATAGGCT | 35 | 18755 | 18770 | 1089 |
| 827301 | N/A | N/A | CACATAGCCCAGATAG | 31 | 18834 | 18849 | 1090 |
| 827302 | N/A | N/A | TGCCAAAGGAGCATGG | 61 | 18901 | 18916 | 1091 |
| 827303 | N/A | N/A | CTTGAGTAAAAGTGCC | 30 | 18913 | 18928 | 1092 |
| 827304 | N/A | N/A | GTACAGCTCTTGAGAT | 46 | 18955 | 18970 | 1093 |
| 827317 | N/A | N/A | GGTAAGAAGTGACACC | 57 | 19364 | 19379 | 1094 |
| 827318 | N/A | N/A | GTGTACTGGGCAGAGT | 20 | 19390 | 19405 | 1095 |
| 827319 | N/A | N/A | TGCTACCATCTTACTT | 52 | 19463 | 19478 | 1096 |
| 827320 | N/A | N/A | GGCTTAGGTGTTGCTA | 45 | 19474 | 19489 | 1097 |
| 827321 | N/A | N/A | GCGGACTCAGGCTTAG | 51 | 19483 | 19498 | 1098 |
| 827322 | N/A | N/A | TGACAGGTGTGGGCGG | 48 | 19495 | 19510 | 1099 |
| 827323 | N/A | N/A | GTGACAGGTGTGGGCG | 66 | 19496 | 19511 | 1100 |
| 827324 | N/A | N/A | GTCCAGGTGACAGTTA | 38 | 19522 | 19537 | 1101 |
| 827337 | N/A | N/A | CCCAGGCGAGCAATGA | 20 | 19746 | 19761 | 1102 |
| 827338 | N/A | N/A | GGTATAACAACCCAGG | 25 | 19756 | 19771 | 1103 |
| 827339 | N/A | N/A | CAGTAGGGTGGAGTGG | 74 | 19774 | 19789 | 1104 |
| 827340 | N/A | N/A | GTACAAAGGTTCCTGT | 74 | 19829 | 19844 | 1105 |
| 827341 | N/A | N/A | CGTGAAGTAAGGTTGA | 31 | 19846 | 19861 | 1106 |
| 827342 | N/A | N/A | GTTACATGTGGTGACG | 53 | 19860 | 19875 | 1107 |
| 827343 | N/A | N/A | AGTTACATGTGGTGAC | 45 | 19861 | 19876 | 1108 |
| 827344 | N/A | N/A | TAGTTACATGTGGTGA | 31 | 19862 | 19877 | 1109 |
| 827356 | N/A | N/A | AGGACTAACTGGAATA | 27 | 19876 | 19891 | 1110 |
| 827357 | N/A | N/A | CAGGACTAACTGGAAT | 31 | 19877 | 19892 | 1111 |
| 827358 | N/A | N/A | GCCCGGTGAGATATTC | 80 | 19923 | 19938 | 1112 |
| 827359 | N/A | N/A | CCCGATAGCTGGTTGT | 18 | 20415 | 20430 | 1113 |
| 827360 | N/A | N/A | TTAATTAGTTCACCCG | 12 | 20427 | 20442 | 1114 |
| 827361 | N/A | N/A | AGTGAATCCTCACACT | 161 | 20444 | 20459 | 1115 |
| 827362 | N/A | N/A | CCTAGCTGGGAGGTGT | 56 | 20516 | 20531 | 1116 |
| 827363 | N/A | N/A | CATGTTGGAGGTGATC | 58 | 20531 | 20546 | 1117 |
| 827376 | N/A | N/A | TCATAGGTAAACACCC | 31 | 21565 | 21580 | 1118 |
| 827377 | N/A | N/A | GAAAAGTCTGGTAGCT | 23 | 21628 | 21643 | 1119 |
| 827378 | N/A | N/A | TGGTGTGACCATTTGG | 13 | 21643 | 21658 | 1120 |
| 827379 | N/A | N/A | ATGGTGTGACCATTTG | 7 | 21644 | 21659 | 1121 |
| 827380 | N/A | N/A | AAATGGTGTGACCATT | 72 | 21646 | 21661 | 1122 |
| 827381 | N/A | N/A | TAAATGGTGTGACCAT | 41 | 21647 | 21662 | 1123 |
| 827382 | N/A | N/A | GTTAAATGGTGTGACC | 14 | 21649 | 21664 | 1124 |
| 827394 | N/A | N/A | GTACGATTACAGGGAT | 31 | 21753 | 21768 | 1125 |
| 827395 | N/A | N/A | AGTACGATTACAGGGA | 5 | 21754 | 21769 | 1126 |
| 827396 | N/A | N/A | TAGTACGATTACAGGG | 90 | 21755 | 21770 | 1127 |
| 827397 | N/A | N/A | CTAGTACGATTACAGG | 24 | 21756 | 21771 | 1128 |
| 827398 | N/A | N/A | ACTAGTACGATTACAG | 29 | 21757 | 21772 | 1129 |
| 827399 | N/A | N/A | CACTAGTACGATTACA | 50 | 21758 | 21773 | 1130 |
| 827400 | N/A | N/A | TCACTAGTACGATTAC | 78 | 21759 | 21774 | 1131 |
| 827401 | N/A | N/A | CTCACTAGTACGATTA | 34 | 21760 | 21775 | 1132 |
| 827413 | N/A | N/A | CCTATGAGAATCAGTA | 16 | 22313 | 22328 | 1133 |
| 827414 | N/A | N/A | GCCTATGAGAATCAGT | 19 | 22314 | 22329 | 1134 |
| 827415 | N/A | N/A | CTATAGTGGCCTATGA | 111 | 22322 | 22337 | 1135 |
| 827416 | N/A | N/A | GATACACACTAAGCAC | 23 | 22342 | 22357 | 1136 |
| 827417 | N/A | N/A | AGATACACACTAAGCA | 11 | 22343 | 22358 | 1137 |
| 827418 | N/A | N/A | GCACACTACAGCGAGA | 55 | 22455 | 22470 | 1138 |
| 827419 | N/A | N/A | AAACATAGAGCTTCGA | 7 | 22721 | 22736 | 1139 |
| 827432 | N/A | N/A | GGTGAGCCCTTCGCAC | 11 | 22828 | 22843 | 1140 |
| 827433 | N/A | N/A | TGAAGGAGAGGCTACA | 39 | 22866 | 22881 | 1141 |
| 827434 | N/A | N/A | ATTCTAGGATGTACTG | 53 | 22926 | 22941 | 1142 |
| 827435 | N/A | N/A | GTGACATACTGGTGCA | 17 | 22943 | 22958 | 1143 |
| 827436 | N/A | N/A | GGGATATTCCACTGGC | 37 | 22983 | 22998 | 1144 |
| 827437 | N/A | N/A | AACTAGGTGATCCGGG | 9 | 22996 | 23011 | 1145 |
| 827438 | N/A | N/A | AATGTAGGATGATTCT | 29 | 23030 | 23045 | 1146 |
| 827439 | N/A | N/A | TTCTAAGCTTATTCTC | 34 | 23057 | 23072 | 1147 |
| 827451 | N/A | N/A | GGTGAGCACGGAGCTG | 35 | 23471 | 23486 | 1148 |
| 827452 | N/A | N/A | GGAGAAAGTGTGACCA | 57 | 23489 | 23504 | 1149 |
| 827453 | N/A | N/A | GAGCAGGGTTAAAGGA | 110 | 23502 | 23517 | 1150 |
| 827454 | N/A | N/A | TGTCATCTAGGAGATA | 123 | 23597 | 23612 | 1151 |
| 827455 | N/A | N/A | TTGCATAGATCCTGTC | 47 | 23609 | 23624 | 1152 |
| 827456 | N/A | N/A | CTTGATGACAGGAGCC | 67 | 23660 | 23675 | 1153 |
| 827457 | N/A | N/A | TTGAATCATGAGCTCC | 35 | 23675 | 23690 | 1154 |
| 827458 | N/A | N/A | GCCCATGCATCTAAGT | 38 | 23703 | 23718 | 1155 |
| 827471 | N/A | N/A | GGACTATGTGGCACCT | 43 | 24342 | 24357 | 1156 |
| 827472 | N/A | N/A | TGGCAACCCCTGAGCT | 80 | 24412 | 24427 | 1157 |
| 827473 | N/A | N/A | GTTCAGGAAGACCCGC | 166 | 24437 | 24452 | 1158 |
| 827474 | N/A | N/A | GCAGAGGCGGGAATCC | 78 | 24524 | 24539 | 1159 |
| 827475 | N/A | N/A | CATCAGGGACAGACCT | 78 | 24564 | 24579 | 1160 |
| 827476 | N/A | N/A | CTGCAATCTGAGGCGC | 85 | 24761 | 24776 | 1161 |
| 827477 | N/A | N/A | CCCTAAGCATGCCTTG | 46 | 24939 | 24954 | 1162 |
| 827478 | N/A | N/A | TTTCAAGGCCACTAGG | 109 | 24974 | 24989 | 1163 |
| 827491 | N/A | N/A | ACCTTAGGAGCCATTG | 27 | 26493 | 26508 | 1164 |
| 827492 | N/A | N/A | ACCCATGTATCTTCTA | 46 | 26627 | 26642 | 1165 |
| 827493 | N/A | N/A | AATGAGACAGACCCAT | 62 | 26637 | 26652 | 1166 |
| 827494 | N/A | N/A | GGATACAGTATGTCCA | 78 | 26685 | 26700 | 1167 |
| 827495 | N/A | N/A | CTCTACTATTGAATGG | 46 | 26699 | 26714 | 1168 |
| 827496 | N/A | N/A | ATTATATACCTCTACT | 58 | 26708 | 26723 | 1169 |
| 827497 | N/A | N/A | ATCTTAAACAGGTCCA | 16 | 26745 | 26760 | 1170 |
| 827498 | N/A | N/A | ACTGATTGTGCCCTTG | 17 | 26777 | 26792 | 1171 |
| 827511 | N/A | N/A | CCAGGAGGCCACGACT | 30 | 27241 | 27256 | 1172 |
| 827512 | N/A | N/A | TACAATCCTCTAAGGT | 43 | 27271 | 27286 | 1173 |
| 827513 | N/A | N/A | CTGTATACCCTGGGAC | 59 | 27378 | 27393 | 1174 |
| 827514 | N/A | N/A | TCTCAGCAATCAATAT | 62 | 27490 | 27505 | 1175 |
| 827515 | N/A | N/A | GGGAAGTAAGCCCTAG | 47 | 27559 | 27574 | 1176 |
| 827516 | N/A | N/A | GGCTGGAGATCTTTAG | 34 | 27607 | 27622 | 1177 |
| 827517 | N/A | N/A | CCCAAATCCCTACCAG | 61 | 27623 | 27638 | 1178 |
| 827518 | N/A | N/A | GTCATTATTGCTACTT | 17 | 27675 | 27690 | 1179 |
| 827531 | N/A | N/A | CAGAATAGCCGGGCGC | 46 | 28650 | 28665 | 1180 |
| 827532 | N/A | N/A | GGCAGACACGAGGGTC | 40 | 28699 | 28714 | 1181 |
| 827533 | N/A | N/A | CCATACGGATGAACCT | 35 | 28741 | 28756 | 1182 |
| 827534 | N/A | N/A | TACCATACGGATGAAC | 20 | 28743 | 28758 | 1183 |
| 827535 | N/A | N/A | CTACCATACGGATGAA | 49 | 28744 | 28759 | 1184 |
| 827536 | N/A | N/A | GCTACCATACGGATGA | 23 | 28745 | 28760 | 1185 |
| 827537 | N/A | N/A | TGCTACCATACGGATG | 59 | 28746 | 28761 | 1186 |
| 827550 | N/A | N/A | AGGGAATTAAGCCACA | 13 | 29501 | 29516 | 1187 |
| 827551 | N/A | N/A | GGATACACCAGTGTAA | 32 | 29904 | 29919 | 1188 |
| 827552 | N/A | N/A | AGCTAAGTCAGGCGAA | 67 | 29930 | 29945 | 1189 |
| 827553 | N/A | N/A | TATGAGTGTGCCTTTG | 25 | 30329 | 30344 | 1190 |
| 827554 | N/A | N/A | TTCAAGGTTGCAAGTG | 41 | 30348 | 30363 | 1191 |
| 827555 | N/A | N/A | AGCTAAGCCAGGGACA | 67 | 30416 | 30431 | 1192 |
| 827556 | N/A | N/A | GCCTTATGAGTGGCAG | 54 | 30456 | 30471 | 1193 |
| 827557 | N/A | N/A | CCACTTTACAAGAGCA | 22 | 30492 | 30507 | 1194 |
| 827570 | N/A | N/A | ATCAAGGTCACTCCCA | 48 | 30959 | 30974 | 1195 |
| 827571 | N/A | N/A | GAAGACCCATTCCTAG | 78 | 30992 | 31007 | 1196 |
| 827572 | N/A | N/A | CCATATCGATCCCTCT | 132 | 31115 | 31130 | 1197 |
| 827573 | N/A | N/A | GAATTTCCTGGACCTT | 84 | 31142 | 31157 | 1198 |
| 827574 | N/A | N/A | GAAATGGTAGAGGATG | 46 | 31157 | 31172 | 1199 |
| 827575 | N/A | N/A | AGGCACGACCTACCGT | 139 | 31272 | 31287 | 1200 |
| 827576 | N/A | N/A | CTCCATCCAGGCACGA | 55 | 31280 | 31295 | 1201 |
| 827577 | N/A | N/A | AAGTAAGACCCCCAGA | 79 | 31306 | 31321 | 1202 |

TABLE 4
Percent level of human α-ENaC mRNA

| | SEQ | SEQ | | | | | |
|---|---|---|---|---|---|---|---|
| | ID: | ID: | | | SEQ | SEQ | |
| Com- | 1 | 1 | | α-ENaC | ID: 2 | ID 2: | SEQ |
| pound | Start | Stop | | (% | Start | Stop | ID |
| Number | Site | Site | Sequence | control) | Site | Site | NO |
| 668182 | 535 | 550 | CCAGAAGGCCGTCTTC | 34 | 5463 | 5478 | 1203 |
| 668208 | 764 | 779 | ATTTGTACAGGTCAAA | 35 | 16349 | 16364 | 1204 |
| 668218 | 974 | 989 | ATTTGTTCTGGTTGCA | 19 | 17760 | 17775 | 1205 |
| 826072 | 7 | 22 | GCTTTAGACGCAGACA | 102 | 4268 | 4283 | 1206 |
| 826073 | 9 | 24 | GGGCTTTAGACGCAGA | 68 | 4270 | 4285 | 1207 |
| 826082 | 37 | 52 | TGGACCTGAGAAGGCG | 58 | 4298 | 4313 | 1208 |
| 826083 | 40 | 55 | TACTGGACCTGAGAAG | 66 | 4301 | 4316 | 1209 |
| 826084 | 42 | 57 | AGTACTGGACCTGAGA | 55 | 4303 | 4318 | 1210 |
| 826085 | 44 | 59 | GGAGTACTGGACCTGA | 55 | 4305 | 4320 | 1211 |
| 826086 | 45 | 60 | GGGAGTACTGGACCTG | 62 | 4306 | 4321 | 1212 |
| 826087 | 46 | 61 | TGGGAGTACTGGACCT | 81 | 4307 | 4322 | 1213 |
| 826088 | 47 | 62 | CTGGGAGTACTGGACC | 59 | 4308 | 4323 | 1214 |
| 826089 | 50 | 65 | GAACTGGGAGTACTGG | 81 | 4311 | 4326 | 1215 |
| 826092 | 62 | 77 | CCGAGGGCAGGTGAAC | 99 | 4323 | 4338 | 1216 |
| 826093 | 72 | 87 | AGGAGGGCTCCCGAGG | 81 | 4333 | 4348 | 1217 |
| 826102 | 94 | 109 | GAGCCGGGAGTTTTCC | 45 | 4355 | 4370 | 1218 |
| 826103 | 95 | 110 | AGAGCCGGGAGTTTTC | 71 | 4356 | 4371 | 1219 |
| 826104 | 98 | 113 | GTCAGAGCCGGGAGTT | 73 | 4359 | 4374 | 1220 |
| 826105 | 99 | 114 | AGTCAGAGCCGGGAGT | 73 | 4360 | 4375 | 1221 |
| 826106 | 100 | 115 | GAGTCAGAGCCGGGAG | 51 | 4361 | 4376 | 1222 |
| 826107 | 101 | 116 | GGAGTCAGAGCCGGGA | 53 | 4362 | 4377 | 1223 |
| 826108 | 138 | 153 | AATTAAAGGTGAGCAG | 67 | 4399 | 4414 | 1224 |
| 826109 | 143 | 158 | ATCTCAATTAAAGGTG | 91 | 4404 | 4419 | 1225 |
| 826112 | 164 | 179 | AGCGACAGGAATCTCA | 79 | 4425 | 4440 | 1226 |
| 826113 | 166 | 181 | GAAGCGACAGGAATCT | 68 | 4427 | 4442 | 1227 |
| 826122 | 181 | 196 | GGCCGGCCAGGGATGG | 41 | 4442 | 4457 | 1228 |
| 826123 | 182 | 197 | TGGCCGGCCAGGGATG | 55 | 4443 | 4458 | 1229 |
| 826124 | 183 | 198 | CTGGCCGGCCAGGGAT | 69 | 4444 | 4459 | 1230 |
| 826125 | 187 | 202 | CCCGCTGGCCGGCCAG | 32 | 4448 | 4463 | 1231 |
| 826126 | 188 | 203 | GCCCGCTGGCCGGCCA | 90 | 4449 | 4464 | 1232 |
| 826127 | 190 | 205 | CCGCCCGCTGGCCGGC | 58 | 4451 | 4466 | 1233 |
| 826128 | 192 | 207 | GCCCGCCCGCTGGCCG | 81 | 4453 | 4468 | 1234 |
| 826129 | 194 | 209 | GAGCCCGCCCGCTGGC | 57 | 4455 | 4470 | 1235 |
| 826132 | 217 | 232 | ACAGGTGCAGCGGCCT | 76 | 4478 | 4493 | 1236 |
| 826133 | 224 | 239 | TCCCCTGACAGGTGCA | 78 | N/A | N/A | 1237 |
| 826142 | 256 | 271 | CAGAGGTCTAGGGTCC | 26 | 5184 | 5199 | 1238 |
| 826143 | 259 | 274 | CTGCAGAGGTCTAGGG | 36 | 5187 | 5202 | 1239 |
| 826144 | 267 | 282 | GGTATGGGCTGCAGAG | 24 | 5195 | 5210 | 1240 |
| 826145 | 269 | 284 | CTGGTATGGGCTGCAG | 31 | 5197 | 5212 | 1241 |
| 826146 | 272 | 287 | GACCTGGTATGGGCTG | 30 | 5200 | 5215 | 1242 |
| 826147 | 275 | 290 | TGAGACCTGGTATGGG | 38 | 5203 | 5218 | 1243 |
| 826148 | 278 | 293 | CCATGAGACCTGGTAT | 50 | 5206 | 5221 | 1244 |
| 826149 | 280 | 295 | CTCCATGAGACCTGGT | 42 | 5208 | 5223 | 1245 |
| 826152 | 284 | 299 | TCCCCTCCATGAGACC | 50 | 5212 | 5227 | 1246 |
| 826153 | 286 | 301 | GTTCCCCTCCATGAGA | 65 | 5214 | 5229 | 1247 |
| 826162 | 332 | 347 | GCCCTGGAGTGGACTG | 46 | 5260 | 5275 | 1248 |
| 826163 | 333 | 348 | AGCCCTGGAGTGGACT | 41 | 5261 | 5276 | 1249 |
| 826164 | 343 | 358 | CCCCTTCATGAGCCCT | 30 | 5271 | 5286 | 1250 |
| 826165 | 344 | 359 | TCCCCTTCATGAGCCC | 30 | 5152 | 5167 | 1251 |
| | | | | | 5272 | 5287 | |
| 826166 | 345 | 360 | TTCCCCTTCATGAGCC | 29 | 5153 | 5168 | 1252 |
| | | | | | 5273 | 5288 | |
| 826167 | 350 | 365 | GCTTGTTCCCCTTCAT | 12 | 5158 | 5173 | 1253 |
| | | | | | 5278 | 5293 | |
| 826168 | 351 | 366 | CGCTTGTTCCCCTTCA | 19 | 5279 | 5294 | 1254 |
| 826169 | 352 | 367 | ACGCTTGTTCCCCTTC | 20 | 5280 | 5295 | 1255 |
| 826172 | 356 | 37 | CCTCACGCTTGTTCCC | 41 | 5284 | 5299 | 1256 |
| 826173 | 359 | 374 | GCTCCTCACGCTTGTT | 48 | 5287 | 5302 | 1257 |
| 826182 | 425 | 440 | ACTCGATCAGGGCCTC | 34 | 5353 | 5368 | 1258 |
| 826183 | 427 | 442 | GAACTCGATCAGGGCC | 21 | 5355 | 5370 | 1259 |
| 826184 | 429 | 444 | TGGAACTCGATCAGGG | 45 | 5357 | 5372 | 1260 |
| 826185 | 431 | 446 | GGTGGAACTCGATCAG | 26 | 5359 | 5374 | 1261 |
| 826186 | 432 | 447 | CGGTGGAACTCGATCA | 36 | 5360 | 5375 | 1262 |
| 826187 | 433 | 448 | GCGGTGGAACTCGATC | 47 | 5361 | 5376 | 1263 |
| 826188 | 435 | 450 | GAGCGGTGGAACTCGA | 39 | 5363 | 5378 | 1264 |
| 826189 | 436 | 451 | GGAGCGGTGGAACTCG | 53 | 5364 | 5379 | 1265 |
| 826192 | 443 | 458 | CTCGGTAGGAGCGGTG | 50 | 5371 | 5386 | 1266 |
| 826193 | 445 | 460 | CTCTCGGTAGGAGCGG | 42 | 5373 | 5388 | 1267 |
| 826202 | 516 | 531 | CGGTTGTGCTGGGAGC | 19 | 5444 | 5459 | 1268 |
| 826203 | 517 | 532 | GCGGTTGTGCTGGGAG | 24 | 5445 | 5460 | 1269 |
| 826204 | 519 | 534 | ATGCGGTTGTGCTGGG | 23 | 5447 | 5462 | 1270 |
| 826205 | 524 | 539 | TCTTCATGCGGTTGTG | 31 | 5452 | 5467 | 1271 |
| 826206 | 529 | 544 | GGCCGTCTTCATGCGG | 39 | 5457 | 5472 | 1272 |
| 826207 | 532 | 547 | GAAGGCCGTCTTCATG | 27 | 5460 | 5475 | 1273 |
| 826208 | 564 | 579 | ATGCCAAAGGTGCAGA | 51 | 5492 | 5507 | 1274 |
| 826211 | 569 | 584 | ACATCATGCCAAAGGT | 33 | 5497 | 5512 | 1275 |
| 826212 | 573 | 588 | CAGTACATCATGCCAA | 42 | 5501 | 5516 | 1276 |
| 826221 | 590 | 605 | AAAGCAGGCCGAATTG | 38 | 5518 | 5533 | 1277 |
| 826222 | 594 | 609 | CCGAAAAGCAGGCCGA | 27 | 5522 | 5537 | 1278 |
| 826223 | 596 | 611 | CTCCGAAAAGCAGGCC | 31 | 5524 | 5539 | 1279 |
| 826224 | 598 | 613 | CTCTCCGAAAAGCAGG | 37 | 5526 | 5541 | 1280 |
| 826225 | 599 | 614 | ACTCTCCGAAAAGCAG | 27 | 5527 | 5542 | 1281 |
| 826226 | 601 | 616 | GTACTCTCCGAAAAGC | 20 | 5529 | 5544 | 1282 |
| 826227 | 602 | 617 | AGTACTCTCCGAAAAG | 43 | 5530 | 5545 | 1283 |
| 826228 | 605 | 620 | TGAAGTACTCTCCGAA | 44 | 5533 | 5548 | 1284 |
| 826231 | 610 | 625 | GTAGCTGAAGTACTCT | 35 | 5538 | 5553 | 1285 |
| 826232 | 611 | 626 | GGTAGCTGAAGTACTC | 23 | 5539 | 5554 | 1286 |
| 826241 | 650 | 665 | CGAGCTTGTCCGAGTT | 17 | 5578 | 5593 | 1287 |
| 826242 | 652 | 667 | GACGAGCTTGTCCGAG | 22 | 5580 | 5595 | 1288 |
| 826243 | 653 | 668 | AGACGAGCTTGTCCGA | 23 | 5581 | 5596 | 1289 |
| 826244 | 655 | 670 | GAAGACGAGCTTGTCC | 30 | 5583 | 5598 | 1290 |
| 826245 | 656 | 671 | GGAAGACGAGCTTGTC | 27 | 5584 | 5599 | 1291 |
| 826246 | 657 | 672 | GGGAAGACGAGCTTGT | 21 | 5585 | 5600 | 1292 |
| 826247 | 699 | 714 | TCCGGGTACCTGTAGG | 32 | N/A | N/A | 1293 |
| 826248 | 700 | 715 | TTCCGGGTACCTGTAG | 38 | N/A | N/A | 1294 |
| 826251 | 705 | 720 | TTAATTTCCGGGTACC | 27 | 16290 | 16305 | 1295 |
| 826252 | 709 | 724 | CTCTTTAATTTCCGGG | 31 | 16294 | 16309 | 1296 |
| 826261 | 763 | 778 | TTTGTACAGGTCAAAG | 43 | 16348 | 16363 | 1297 |
| 826262 | 766 | 781 | GTATTTGTACAGGTCA | 12 | 16351 | 16366 | 1298 |
| 826263 | 77 | 792 | GTGAAGGAGCTGTATT | 93 | 16362 | 16377 | 1299 |
| 826264 | 786 | 801 | ACGAGAGTGGTGAAGG | 43 | 16371 | 16386 | 1300 |
| 826265 | 788 | 803 | CCACGAGAGTGGTGAA | 56 | 16373 | 16388 | 1301 |
| 826266 | 789 | 804 | GCCACGAGAGTGGTGA | 77 | 16374 | 16389 | 1302 |
| 826269 | 794 | 809 | AGCCGGCCACGAGAGT | 43 | 16379 | 16394 | 1303 |
| 826270 | 795 | 810 | GAGCCGGCCACGAGAG | 42 | 16380 | 16395 | 1304 |
| 826279 | 812 | 827 | GGTCGCGACGGCTGCG | 31 | 16397 | 16412 | 1305 |
| 826280 | 815 | 830 | GCAGGTCGCGACGGCT | 48 | 16400 | 16415 | 1306 |
| 826281 | 816 | 831 | CGCAGGTCGCGACGGC | 35 | 16401 | 16416 | 1307 |
| 826282 | 819 | 834 | CCCCGCAGGTCGCGAC | 49 | 16404 | 16419 | 1308 |
| 826283 | 820 | 835 | CCCCCGCAGGTCGCGA | 43 | 16405 | 16420 | 1309 |
| 826284 | 821 | 836 | TCCCCCGCAGGTCGCG | 35 | 16406 | 16421 | 1310 |
| 826285 | 822 | 837 | GTCCCCCGCAGGTCGC | 49 | 16407 | 16422 | 1311 |
| 826286 | 824 | 839 | GAGTCCCCCGCAGGTC | 67 | 16409 | 16424 | 1312 |
| 826289 | 831 | 846 | TGCGGCAGAGTCCCCC | 37 | 16416 | 16431 | 1313 |
| 826290 | 833 | 848 | GGTGCGGCAGAGTCCC | 38 | 16418 | 16433 | 1314 |
| 826299 | 893 | 908 | CCACGCTACGGGCTCG | 33 | 16478 | 16493 | 1315 |
| 826300 | 895 | 910 | GGCCACGCTACGGGCT | 56 | 16480 | 16495 | 1316 |
| 826301 | 897 | 912 | GAGGCCACGCTACGGG | 36 | 16482 | 16497 | 1317 |
| 826302 | 898 | 913 | GGAGGCCACGCTACGG | 34 | 16483 | 16498 | 1318 |
| 826303 | 900 | 915 | CTGGAGGCCACGCTAC | 49 | 16485 | 16500 | 1319 |
| 826304 | 902 | 917 | AGCTGGAGGCCACGCT | 28 | 16487 | 16502 | 1320 |
| 826305 | 908 | 923 | CCCGCAAGCTGGAGGC | 41 | 16493 | 16508 | 1321 |
| 826306 | 913 | 928 | GTTGTCCCGCAAGCTG | 23 | 16498 | 16513 | 1322 |
| 826309 | 917 | 932 | GGTTGTTGTCCCGCAA | 33 | 16502 | 16517 | 1323 |
| 826310 | 918 | 933 | GGGTTGTTGTCCCGCA | 43 | 16503 | 16518 | 1324 |
| 826319 | 971 | 986 | TGTTCTGGTTGCACAG | 35 | N/A | N/A | 1325 |
| 826320 | 972 | 987 | TTGTTCTGGTTGCACA | 38 | N/A | N/A | 1326 |
| 826321 | 973 | 988 | TTTGTTCTGGTTGCAC | 23 | 17759 | 17774 | 1327 |
| 826322 | 975 | 990 | GATTTGTTCTGGTTGC | 36 | 17761 | 17776 | 1328 |
| 826323 | 976 | 991 | CGATTTGTTCTGGTTG | 22 | 17762 | 17777 | 1329 |
| 826324 | 978 | 993 | TCCGATTTGTTCTGGT | 38 | 17764 | 17779 | 1330 |
| 826327 | 981 | 996 | CAGTCCGATTTGTTCT | 36 | 17767 | 17782 | 1331 |
| 826328 | 982 | 997 | GCAGTCCGATTTGTTC | 34 | 17768 | 17783 | 1332 |
| 826337 | 1000 | 1015 | TGAGTATGTCTGGTAG | 19 | 17786 | 17801 | 1333 |
| 826338 | 1001 | 1016 | ATGAGTATGTCTGGTA | 15 | 17787 | 17802 | 1334 |
| 826339 | 1003 | 1018 | TGATGAGTATGTCTGG | 19 | 17789 | 17804 | 1335 |
| 826340 | 1007 | 1022 | CCCCTGATGAGTATGT | 41 | 17793 | 17808 | 1336 |
| 826341 | 1009 | 1024 | CACCCCTGATGAGTAT | 61 | 17795 | 17810 | 1337 |
| 826342 | 1011 | 1026 | TCCACCCCTGATGAGT | 36 | 17797 | 17812 | 1338 |
| 826343 | 1014 | 1029 | GCATCCACCCCTGATG | 56 | 17800 | 17815 | 1339 |
| 826344 | 1015 | 1030 | CGCATCCACCCCTGAT | 70 | 17801 | 17816 | 1340 |
| 826347 | 1019 | 1034 | TCACCGCATCCACCCC | 35 | 17805 | 17820 | 1341 |
| 826348 | 1021 | 1036 | CCTCACCGCATCCACC | 72 | 17807 | 17822 | 1342 |
| 826357 | 1047 | 1062 | TTGATGTAGTGGAAGC | 39 | 17833 | 17848 | 1343 |
| 826358 | 1058 | 1073 | TCGACAGGATGTTGAT | 56 | 17844 | 17859 | 1344 |
| 826359 | 1060 | 1075 | CCTCGACAGGATGTTG | 28 | 17846 | 17861 | 1345 |
| 826360 | 1061 | 1076 | GCCTCGACAGGATGTT | 37 | 17847 | 17862 | 1346 |
| 826361 | 1064 | 1079 | GCAGCCTCGACAGGAT | 45 | 17850 | 17865 | 1347 |
| 826362 | 1065 | 1080 | GGCAGCCTCGACAGGA | 22 | 17851 | 17866 | 1348 |
| 826363 | 1074 | 1089 | AGAGTCTCTGGCAGCC | 25 | 17860 | 17875 | 1349 |
| 826364 | 1110 | 1125 | ATGAAGTTGCCCAGCG | 64 | 17896 | 17911 | 1350 |
| 826367 | 1117 | 1132 | GGCGAAGATGAAGTTG | 47 | 17903 | 17918 | 1351 |
| 826368 | 1121 | 1136 | GGCAGGCGAAGATGAA | 46 | 17907 | 17922 | 1352 |
| 826377 | 1148 | 1163 | CCTGGTTGCAGGAGAC | 24 | 17934 | 17949 | 1353 |
| 826378 | 1150 | 1165 | CGCCTGGTTGCAGGAG | 38 | 17936 | 17951 | 1354 |
| 826379 | 1152 | 1167 | TTCGCCTGGTTGCAGG | 54 | N/A | N/A | 1355 |
| 826380 | 1153 | 1168 | ATTCGCCTGGTTGCAG | 52 | N/A | N/A | 1356 |
| 826381 | 1155 | 1170 | TAATTCGCCTGGTTGC | 86 | N/A | N/A | 1357 |
| 826382 | 1157 | 1172 | AGTAATTCGCCTGGTT | 73 | N/A | N/A | 1358 |
| 826383 | 1158 | 1173 | GAGTAATTCGCCTGGT | 49 | N/A | N/A | 1359 |
| 826384 | 1160 | 1175 | GAGAGTAATTCGCCTG | 63 | N/A | N/A | 1360 |
| 826387 | 1168 | 1183 | GTGGAAGTGAGAGTAA | 48 | 24124 | 24139 | 1361 |
| 826388 | 1230 | 1245 | GACATCCAGAGGTTGG | 47 | 24186 | 24201 | 1362 |
| 826397 | 1261 | 1276 | GGACAGACCGTTGTTG | 31 | N/A | N/A | 1363 |
| 826398 | 1267 | 1282 | CATCAGGGACAGACCG | 40 | N/A | N/A | 1364 |
| 826399 | 1268 | 1283 | GCATCAGGGACAGACC | 24 | 24565 | 24580 | 1365 |
| 826400 | 1273 | 1288 | GCGCAGCATCAGGGAC | 28 | 24570 | 24585 | 1366 |
| 826401 | 1275 | 1290 | GCGCGCAGCATCAGGG | 37 | 24572 | 24587 | 1367 |
| 826402 | 1277 | 1292 | CTGCGCGCAGCATCAG | 35 | 24574 | 24589 | 1368 |
| 826403 | 1279 | 1294 | CTCTGCGCGCAGCATC | 20 | 24576 | 24591 | 1369 |
| 826404 | 1280 | 1295 | GCTCTGCGCGCAGCAT | 49 | 24577 | 24592 | 1370 |
| 826407 | 1283 | 1298 | TCTGCTCTGCGCGCAG | 65 | 24580 | 24595 | 1371 |
| 826408 | 1284 | 1299 | TTCTGCTCTGCGCGCA | 49 | 24581 | 24596 | 1372 |
| 826417 | 1333 | 1348 | CACCATTACCCGGGCC | 34 | 24630 | 24645 | 1373 |
| 826418 | 1341 | 1356 | TGCCCGTGCACCATTA | 30 | 24638 | 24653 | 1374 |
| 826419 | 1343 | 1358 | CCTGCCCGTGCACCAT | 25 | 24640 | 24655 | 1375 |
| 826420 | 1344 | 1359 | TCCTGCCCGTGCACCA | 18 | 24641 | 24656 | 1376 |
| 826421 | 1345 | 1360 | ATCCTGCCCGTGCACC | 31 | 24642 | 24657 | 1377 |
| 826422 | 1348 | 1363 | TTCATCCTGCCCGTGC | 20 | 24645 | 24660 | 1378 |
| 826423 | 1350 | 1365 | GGTTCATCCTGCCCGT | 53 | 24647 | 24662 | 1379 |
| 826424 | 1351 | 1366 | AGGTTCATCCTGCCCG | 78 | 24648 | 24663 | 1380 |
| 826427 | 1358 | 1373 | TAAAGGCAGGTTCATC | 89 | 24655 | 24670 | 1381 |
| 826428 | 1361 | 1376 | CCATAAAGGCAGGTTC | 73 | 24658 | 24673 | 1382 |
| 826437 | 1393 | 1408 | CACGCCAGGCCGCAAG | 36 | 24690 | 24705 | 1383 |
| 826438 | 1394 | 1409 | CCACGCCAGGCCGCAA | 45 | 24691 | 24706 | 1384 |
| 826439 | 1395 | 1410 | TCCACGCCAGGCCGCA | 28 | 24692 | 24707 | 1385 |
| 826440 | 1396 | 1411 | CTCCACGCCAGGCCGC | 38 | 24693 | 24708 | 1386 |
| 826441 | 1399 | 1414 | GGTCTCCACGCCAGGC | 38 | 24696 | 24711 | 1387 |
| 826442 | 1401 | 1416 | GAGGTCTCCACGCCAG | 25 | 24698 | 24713 | 1388 |
| 826443 | 1402 | 1417 | GGAGGTCTCCACGCCA | 55 | 24699 | 24714 | 1389 |
| 826444 | 1404 | 1419 | ATGGAGGTCTCCACGC | 45 | 24701 | 24716 | 1390 |
| 826447 | 1442 | 1457 | CGCCCCCAAGTCTGTC | 38 | 25162 | 25177 | 1391 |
| 826448 | 1443 | 1458 | TCGCCCCCAAGTCTGT | 32 | 25163 | 25178 | 1392 |
| 826457 | 1461 | 1476 | TTGGTGCAGTCGCCAT | 25 | 25181 | 25196 | 1393 |
| 826458 | 1462 | 1477 | CTTGGTGCAGTCGCCA | 43 | 25182 | 25197 | 1394 |
| 826459 | 1463 | 1478 | TCTTGGTGCAGTCGCC | 24 | 25183 | 25198 | 1395 |
| 826460 | 1466 | 1481 | CATTCTTGGTGCAGTC | 40 | 25186 | 25201 | 1396 |
| 826461 | 1468 | 1483 | GCCATTCTTGGTGCAG | 45 | 25188 | 25203 | 1397 |
| 826462 | 1470 | 1485 | CTGCCATTCTTGGTGC | 30 | 25190 | 25205 | 1398 |
| 826463 | 1480 | 1495 | AGGAACATCACTGCCA | 29 | 25200 | 25215 | 1399 |
| 826464 | 1496 | 1511 | GGTAAAGGTTCTCAAC | 68 | 25216 | 25231 | 1400 |
| 826467 | 1509 | 1524 | GTGTACTTTGAAGGGT | 49 | 25229 | 25244 | 1401 |
| 826468 | 1526 | 1541 | GAATACACACCTGCTG | 54 | N/A | N/A | 1402 |
| 826477 | 1558 | 1573 | CTCCTTGATCATGCTC | 31 | 25472 | 25487 | 1403 |
| 826478 | 1559 | 1574 | ACTCCTTGATCATGCT | 36 | 25473 | 25488 | 1404 |
| 826479 | 1560 | 1575 | CACTCCTTGATCATGC | 29 | 25474 | 25489 | 1405 |
| 826480 | 1561 | 1576 | ACACTCCTTGATCATG | 29 | 25475 | 25490 | 1406 |
| 826481 | 1562 | 1577 | CACACTCCTTGATCAT | 38 | 25476 | 25491 | 1407 |
| 826482 | 1564 | 1579 | GCCACACTCCTTGATC | 32 | 25478 | 25493 | 1408 |
| 826483 | 1576 | 1591 | GATGTAGGCACAGCCA | 25 | 25490 | 25505 | 1409 |
| 826484 | 1577 | 1592 | AGATGTAGGCACAGCC | 22 | 25491 | 25506 | 1410 |
| 826486 | 1581 | 1596 | TAGAAGATGTAGGCAC | 47 | 25495 | 25510 | 1411 |
| 826487 | 1582 | 1597 | ATAGAAGATGTAGGCA | 49 | 25496 | 25511 | 1412 |
| 826496 | 1638 | 1653 | TACCCCCAGGAACTGT | 27 | N/A | N/A | 1413 |
| 826497 | 1639 | 1654 | GTACCCCCAGGAACTG | 49 | N/A | N/A | 1414 |
| 826498 | 1640 | 1655 | AGTACCCCCAGGAACT | 65 | N/A | N/A | 1415 |
| 826499 | 1641 | 1656 | CAGTACCCCCAGGAAC | 44 | N/A | N/A | 1416 |
| 826500 | 1648 | 1663 | ATAGTAGCAGTACCCC | 36 | N/A | N/A | 1417 |
| 826501 | 1650 | 1665 | TTATAGTAGCAGTACC | 38 | 30596 | 30611 | 1418 |
| 826502 | 1654 | 1669 | GAGCTTATAGTAGCAG | 59 | 30600 | 30615 | 1419 |
| 826503 | 1655 | 1670 | GGAGCTTATAGTAGCA | 55 | 30601 | 30616 | 1420 |
| 826506 | 1662 | 1677 | TCAACCTGGAGCTTAT | 39 | 30608 | 30623 | 1421 |
| 826507 | 1664 | 1679 | AGTCAACCTGGAGCTT | 41 | 30610 | 30625 | 1422 |
| 826516 | 1717 | 1732 | CACGCTGCATGGCTTC | 21 | N/A | N/A | 1423 |
| 826517 | 1720 | 1735 | GGTCACGCTGCATGGC | 38 | N/A | N/A | 1424 |
| 826518 | 1722 | 1737 | CTGGTCACGCTGCATG | 35 | N/A | N/A | 1425 |
| 826519 | 1723 | 1738 | GCTGGTCACGCTGCAT | 30 | N/A | N/A | 1426 |
| 826520 | 1724 | 1739 | AGCTGGTCACGCTGCA | 41 | N/A | N/A | 1427 |
| 826521 | 1727 | 1742 | GGTAGCTGGTCACGCT | 26 | 30778 | 30793 | 1428 |
| 826522 | 1729 | 1744 | CTGGTAGCTGGTCACG | 46 | 30780 | 30795 | 1429 |
| 826523 | 1732 | 1747 | GAGCTGGTAGCTGGTC | 48 | 30783 | 30798 | 1430 |
| 826526 | 1737 | 1752 | GCAGAGAGCTGGTAGC | 67 | 30788 | 30803 | 1431 |
| 826527 | 1749 | 1764 | CGTGAGTAACCAGCAG | 48 | 30800 | 30815 | 1432 |
| 826556 | 1890 | 1905 | GACTCAGAATTGGTTT | 61 | 31246 | 31261 | 1433 |
| 826557 | 1961 | 1976 | CCGAGGAGCCGAACCA | 50 | 31790 | 31805 | 1434 |
| 826558 | 1965 | 1980 | AACACCGAGGAGCCGA | 14 | 31794 | 31809 | 1435 |
| 826559 | 1966 | 1981 | CAACACCGAGGAGCCG | 36 | 31795 | 31810 | 1436 |
| 826560 | 1968 | 1983 | GACAACACCGAGGAGC | 56 | 31797 | 31812 | 1437 |
| 826561 | 1970 | 1985 | CAGACAACACCGAGGA | 30 | 31799 | 31814 | 1438 |
| 826562 | 1972 | 1987 | CACAGACAACACCGAG | 42 | 31801 | 31816 | 1439 |
| 826563 | 1973 | 1988 | CCACAGACAACACCGA | 60 | 31802 | 31817 | 1440 |
| 826566 | 1998 | 2013 | TCAAAGACGAGCTCAG | 61 | 31827 | 31842 | 1441 |
| 826567 | 1999 | 2014 | GTCAAAGACGAGCTCA | 62 | 31828 | 31843 | 1442 |
| 826576 | 2036 | 2051 | ACCTTCGGAGCAGCAT | 17 | 31865 | 31880 | 1443 |
| 826577 | 2038 | 2053 | GAACCTTCGGAGCAGC | 28 | 31867 | 31882 | 1444 |
| 826578 | 2039 | 2054 | GGAACCTTCGGAGCAG | 17 | 31868 | 31883 | 1445 |
| 826579 | 2040 | 2055 | CGGAACCTTCGGAGCA | 20 | 31869 | 31884 | 1446 |
| 826580 | 2041 | 2056 | TCGGAACCTTCGGAGC | 32 | 31870 | 31885 | 1447 |
| 826581 | 2042 | 2057 | TTCGGAACCTTCGGAG | 30 | 31871 | 31886 | 1448 |
| 826582 | 2043 | 2058 | CTTCGGAACCTTCGGA | 47 | 31872 | 31887 | 1449 |
| 826583 | 2044 | 2059 | GCTTCGGAACCTTCGG | 30 | 31873 | 31888 | 1450 |
| 826585 | 2047 | 2062 | TCGGCTTCGGAACCTT | 32 | 31876 | 31891 | 1451 |
| 826586 | 2048 | 2063 | ATCGGCTTCGGAACCT | 33 | 31877 | 31892 | 1452 |
| 826595 | 2059 | 2074 | TGGAGACCAGTATCGG | 20 | 31888 | 31903 | 1453 |
| 826596 | 2061 | 2076 | CCTGGAGACCAGTATC | 30 | 31890 | 31905 | 1454 |
| 826597 | 2066 | 2081 | CTCGGCCTGGAGACCA | 35 | 31895 | 31910 | 1455 |
| 826598 | 2069 | 2084 | CCCCTCGGCCTGGAGA | 42 | 31898 | 31913 | 1456 |
| 826599 | 2071 | 2086 | GCCCCCTCGGCCTGGA | 64 | 31900 | 31915 | 1457 |
| 826600 | 2072 | 2087 | TGCCCCCTCGGCCTGG | 46 | 31901 | 31916 | 1458 |
| 826601 | 2093 | 2108 | AGGCTACCTCCTGAGC | 48 | 31922 | 31937 | 1459 |
| 826602 | 2098 | 2113 | GGTGGAGGCTACCTCC | 62 | 31927 | 31942 | 1460 |
| 826605 | 2279 | 2294 | GCCCCCCCAGAGGACA | 90 | 32108 | 32123 | 1461 |
| 826606 | 2280 | 2295 | GGCCCCCCCAGAGGAC | 75 | 32109 | 32124 | 1462 |
| 826615 | 2320 | 2335 | GCATCTGCCTTGGTGT | 24 | 32149 | 32164 | 1463 |
| 826616 | 2322 | 2337 | GAGCATCTGCCTTGGT | 24 | 32151 | 32166 | 1464 |
| 826617 | 2324 | 2339 | AGGAGCATCTGCCTTG | 32 | 32153 | 32168 | 1465 |
| 826618 | 2330 | 2345 | CACCAGAGGAGCATCT | 46 | 32159 | 32174 | 1466 |
| 826619 | 2331 | 2346 | CCACCAGAGGAGCATC | 34 | 32160 | 32175 | 1467 |
| 826620 | 2355 | 2370 | AATCTTGCCAGGGCCA | 21 | 32184 | 32199 | 1468 |
| 826621 | 2356 | 2371 | CAATCTTGCCAGGGCC | 37 | 32185 | 32200 | 1469 |
| 826622 | 2359 | 2374 | CTTCAATCTTGCCAGG | 41 | 32188 | 32203 | 1470 |
| 826625 | 2393 | 2408 | GTTTGGGCGGCTCTGA | 36 | 32222 | 32237 | 1471 |
| 826626 | 2395 | 2410 | CAGTTTGGGCGGCTCT | 22 | 32224 | 32239 | 1472 |
| 826635 | 2412 | 2427 | CCTCCACACATCAACG | 38 | 32241 | 32256 | 1473 |
| 826636 | 2435 | 2450 | GAGCCCTTACCCATCT | 50 | 32264 | 32279 | 1474 |
| 826637 | 2436 | 2451 | TGAGCCCTTACCCATC | 49 | 32265 | 32280 | 1475 |
| 826638 | 2439 | 2454 | TCCTGAGCCCTTACCC | 33 | 32268 | 32283 | 1476 |
| 826639 | 2447 | 2462 | GAGCAACTTCCTGAGC | 28 | 32276 | 32291 | 1477 |
| 826640 | 2449 | 2464 | TGGAGCAACTTCCTGA | 39 | 32278 | 32293 | 1478 |
| 826641 | 2459 | 2474 | CTACTGTTCTTGGAGC | 28 | 32288 | 32303 | 1479 |
| 826642 | 2462 | 2477 | CAGCTACTGTTCTTGG | 22 | 32291 | 32306 | 1480 |
| 826645 | 2477 | 2492 | TCTGGGCAGCTTCATC | 37 | 32306 | 32321 | 1481 |
| 826646 | 2490 | 2505 | GAGCCAAGGCACTTCT | 31 | 32319 | 32334 | 1482 |
| 826655 | 2553 | 2568 | CTTAGCCGCAGTTGGG | 13 | 32382 | 32397 | 1483 |
| 826656 | 2554 | 2569 | ACTTAGCCGCAGTTGG | 35 | 32383 | 32398 | 1484 |
| 826657 | 2555 | 2570 | GACTTAGCCGCAGTTG | 40 | 32384 | 32399 | 1485 |
| 826658 | 2556 | 2571 | AGACTTAGCCGCAGTT | 24 | 32385 | 32400 | 1486 |
| 826659 | 2557 | 2572 | GAGACTTAGCCGCAGT | 19 | 32386 | 32401 | 1487 |
| 826660 | 2559 | 2574 | AAGAGACTTAGCCGCA | 18 | 32388 | 32403 | 1488 |
| 826661 | 2561 | 2576 | AAAAGAGACTTAGCCG | 42 | 32390 | 32405 | 1489 |
| 826663 | 2577 | 2592 | TGGCTGATCCAAGGGA | 46 | 32406 | 32421 | 1490 |
| 826664 | 2578 | 2593 | TTGGCTGATCCAAGGG | 48 | 32407 | 32422 | 1491 |
| 826673 | 2587 | 2602 | AAGTTTCGCTTGGCTG | 18 | 32416 | 32431 | 1492 |
| 826674 | 2589 | 2604 | CCAAGTTTCGCTTGGC | 63 | 32418 | 32433 | 1493 |
| 826675 | 2591 | 2606 | CTCCAAGTTTCGCTTG | 33 | 32420 | 32435 | 1494 |
| 826676 | 2593 | 2608 | AGCTCCAAGTTTCGCT | 48 | 32422 | 32437 | 1495 |
| 826677 | 2600 | 2615 | TTGTCAAAGCTCCAAG | 19 | 32429 | 32444 | 1496 |
| 826678 | 2602 | 2617 | CCTTGTCAAAGCTCCA | 8 | 32431 | 32446 | 1497 |
| 826679 | 2604 | 2619 | TTCCTTGTCAAAGCTC | 24 | 32433 | 32448 | 1498 |
| 826680 | 2607 | 2622 | AAGTTCCTTGTCAAAG | 39 | 32436 | 32451 | 1499 |
| 826683 | 2621 | 2636 | GCGGTTTCTTAGGAAA | 22 | 32450 | 32465 | 1500 |
| 826684 | 2622 | 2637 | AGCGGTTTCTTAGGAA | 26 | 32451 | 32466 | 1501 |
| 826693 | 2653 | 2668 | GTACCCTTGGTTGTGT | 21 | 32482 | 32497 | 1502 |
| 826694 | 2655 | 2670 | GTGTACCCTTGGTTGT | 31 | 32484 | 32499 | 1503 |
| 826695 | 2656 | 2671 | CGTGTACCCTTGGTTG | 22 | 32485 | 32500 | 1504 |
| 826696 | 2670 | 2685 | CCCGTGCATGCCTGCG | 23 | 32499 | 32514 | 1505 |
| 826697 | 2674 | 2689 | GAAACCCGTGCATGCC | 28 | 32503 | 32518 | 1506 |
| 826698 | 2676 | 2691 | AGGAAACCCGTGCATG | 21 | 32505 | 32520 | 1507 |
| 826699 | 2677 | 2692 | CAGGAAACCCGTGCAT | 31 | 32506 | 32521 | 1508 |
| 826700 | 2678 | 2693 | GCAGGAAACCCGTGCA | 58 | 32507 | 32522 | 1509 |
| 826703 | 2685 | 2700 | TCGCTGGGCAGGAAAC | 31 | 32514 | 32529 | 1510 |
| 826704 | 2687 | 2702 | CGTCGCTGGGCAGGAA | 29 | 32516 | 32531 | 1511 |
| 826713 | 2736 | 2751 | GTGCTACTGGAGAGCA | 34 | 32565 | 32580 | 1512 |
| 826714 | 2737 | 2752 | TGTGCTACTGGAGAGC | 35 | 32566 | 32581 | 1513 |
| 826715 | 2738 | 2753 | CTGTGCTACTGGAGAG | 19 | 32567 | 32582 | 1514 |
| 826716 | 2739 | 2754 | TCTGTGCTACTGGAGA | 23 | 32568 | 32583 | 1515 |
| 826717 | 2740 | 2755 | ATCTGTGCTACTGGAG | 19 | 32569 | 32584 | 1516 |
| 826718 | 2750 | 2765 | AGGAGCAGACATCTGT | 17 | 32579 | 32594 | 1517 |
| 826719 | 2775 | 2790 | GGGTTTCCCACCCAAG | 91 | 32604 | 32619 | 1518 |
| 826720 | 2810 | 2825 | GGAATTGCCTAAGTAA | 29 | 32639 | 32654 | 1519 |
| 826723 | 2837 | 2852 | GCCCTAGCCCTCGGGA | 66 | 32666 | 32681 | 1520 |
| 826724 | 2839 | 2854 | TAGCCCTAGCCCTCGG | 60 | 32668 | 32683 | 1521 |
| 826733 | 2860 | 2875 | TTTACTTACCCGGGTC | 40 | 32689 | 32704 | 1522 |
| 826734 | 2862 | 2877 | CCTTTACTTACCCGGG | 47 | 32691 | 32706 | 1523 |
| 826735 | 2865 | 2880 | CTGCCTTTACTTACCC | 37 | 32694 | 32709 | 1524 |
| 826736 | 2884 | 2899 | GGCTAGAGGAGCCCTG | 48 | 32713 | 32728 | 1525 |
| 826737 | 2886 | 2901 | GAGGCTAGAGGAGCCC | 46 | 32715 | 32730 | 1526 |
| 826738 | 2891 | 2906 | GGTATGAGGCTAGAGG | 27 | 32720 | 32735 | 1527 |
| 826739 | 2893 | 2908 | CGGGTATGAGGCTAGA | 34 | 32722 | 32737 | 1528 |
| 826740 | 2895 | 2910 | CACGGGTATGAGGCTA | 55 | 32724 | 32739 | 1529 |
| 826743 | 2951 | 2966 | CATGTAGAGGTATGAA | 26 | 32780 | 32795 | 1530 |
| 826744 | 2953 | 2968 | GACATGTAGAGGTATG | 31 | 32782 | 32797 | 1531 |
| 826753 | 2966 | 2981 | AATATCTCAAGCAGAC | 18 | 32795 | 32810 | 1532 |
| 826754 | 2986 | 3001 | GGAAACTTTCAGGCTG | 22 | 32815 | 32830 | 1533 |
| 826755 | 2987 | 3002 | GGGAAACTTTCAGGCT | 25 | 32816 | 32831 | 1534 |
| 826756 | 3001 | 3016 | CTGGCAGATGGTTGGG | 31 | 32830 | 32845 | 1535 |
| 826757 | 3003 | 3018 | CTCTGGCAGATGGTTG | 30 | 32832 | 32847 | 1536 |
| 826758 | 3008 | 3023 | GAGTTCTCTGGCAGAT | 20 | 32837 | 32852 | 1537 |
| 826759 | 3010 | 3025 | AGGAGTTCTCTGGCAG | 22 | 32839 | 32854 | 1538 |
| 826760 | 3011 | 3026 | TAGGAGTTCTCTGGCA | 31 | 32840 | 32855 | 1539 |
| 826762 | 3014 | 3029 | GCATAGGAGTTCTCTG | 30 | 32843 | 32858 | 1540 |
| 826763 | 3015 | 3030 | TGCATAGGAGTTCTCT | 18 | 32844 | 32859 | 1541 |
| 826772 | 3035 | 3050 | CTGAGCAGGGTTCTAA | 20 | 32864 | 32879 | 1542 |
| 826773 | 3036 | 3051 | TCTGAGCAGGGTTCTA | 24 | 32865 | 32880 | 1543 |
| 826774 | 3039 | 3054 | GTGTCTGAGCAGGGTT | 13 | 32868 | 32883 | 1544 |
| 826775 | 3044 | 3059 | TAATGGTGTCTGAGCA | 19 | 32873 | 32888 | 1545 |
| 826776 | 3045 | 3060 | GTAATGGTGTCTGAGC | 11 | 32874 | 32889 | 1546 |
| 826777 | 3074 | 3089 | GACAAGATGTGGCAGA | 22 | 32903 | 32918 | 1547 |
| 826778 | 3097 | 3112 | GCGGAGTGATCAATTT | 50 | 32926 | 32941 | 1548 |
| 826779 | 3099 | 3114 | AGGCGGAGTGATCAAT | 55 | 32928 | 32943 | 1549 |
| 826782 | 3119 | 3134 | TGCTACGGGAGCCCAG | 46 | 32948 | 32963 | 1550 |
| 826783 | 3120 | 3135 | GTGCTACGGGAGCCCA | 24 | 32949 | 32964 | 1551 |
| 826791 | 3129 | 3144 | TGTTATAGTGTGCTAC | 27 | 32958 | 32973 | 1552 |
| 826792 | 3130 | 3145 | ATGTTATAGTGTGCTA | 34 | 32959 | 32974 | 1553 |
| 826793 | 3131 | 3146 | GATGTTATAGTGTGCT | 12 | 32960 | 32975 | 1554 |
| 826794 | 3132 | 3147 | AGATGTTATAGTGTGC | 13 | 32961 | 32976 | 1555 |
| 826795 | 3133 | 3148 | CAGATGTTATAGTGTG | 21 | 32962 | 32977 | 1556 |
| 826796 | 3135 | 3150 | AGCAGATGTTATAGTG | 14 | 32964 | 32979 | 1557 |
| 826797 | 3136 | 3151 | CAGCAGATGTTATAGT | 37 | 32965 | 32980 | 1558 |
| 826798 | 3137 | 3152 | CCAGCAGATGTTATAG | 50 | 32966 | 32981 | 1559 |
| 826801 | 3146 | 3161 | AGCAACACTCCAGCAG | 46 | 32975 | 32990 | 1560 |
| 826802 | 3147 | 3162 | CAGCAACACTCCAGCA | 35 | 32976 | 32991 | 1561 |
| 826810 | 3161 | 3176 | AAAGTATGGTGCAACA | 22 | 32990 | 33005 | 1562 |
| 826811 | 3162 | 3177 | GAAAGTATGGTGCAAC | 19 | 32991 | 33006 | 1563 |
| 826812 | 3163 | 3178 | AGAAAGTATGGTGCAA | 24 | 32992 | 33007 | 1564 |
| 826813 | 3204 | 3219 | GGCACTTACAGTCTAG | 16 | 33033 | 33048 | 1565 |
| 826814 | 3208 | 3223 | GCAAGGCACTTACAGT | 31 | 33037 | 33052 | 1566 |
| 826815 | 3210 | 3225 | CCGCAAGGCACTTACA | 37 | 33039 | 33054 | 1567 |
| 826816 | 3211 | 3226 | ACCGCAAGGCACTTAC | 21 | 33040 | 33055 | 1568 |
| 826819 | 3214 | 3229 | CTGACCGCAAGGCACT | 23 | 33043 | 33058 | 1569 |
| 826820 | 3215 | 3230 | CCTGACCGCAAGGCAC | 38 | 33044 | 33059 | 1570 |
| 826829 | 3226 | 3241 | AAGATTCAGTCCCTGA | 27 | 33055 | 33070 | 1571 |
| 826830 | 3228 | 3243 | GCAAGATTCAGTCCCT | 25 | 33057 | 33072 | 1572 |
| 826831 | 3229 | 3244 | GGCAAGATTCAGTCCC | 21 | 33058 | 33073 | 1573 |
| 826832 | 3230 | 3245 | GGGCAAGATTCAGTCC | 41 | 33059 | 33074 | 1574 |
| 826833 | 3231 | 3246 | CGGGCAAGATTCAGTC | 29 | 33060 | 33075 | 1575 |
| 826834 | 3232 | 3247 | ACGGGCAAGATTCAGT | 29 | 33061 | 33076 | 1576 |
| 826835 | 3233 | 3248 | AACGGGCAAGATTCAG | 23 | 33062 | 33077 | 1577 |
| 826838 | 3237 | 3252 | CATAAACGGGCAAGAT | 47 | 33066 | 33081 | 1578 |
| 826839 | 3238 | 3253 | ACATAAACGGGCAAGA | 42 | 33067 | 33082 | 1579 |
| 826848 | 3256 | 3271 | GGGCTAGACATGGAGC | 20 | 33085 | 33100 | 1580 |
| 826849 | 3259 | 3274 | GATGGGCTAGACATGG | 26 | 33088 | 33103 | 1581 |
| 826850 | 3261 | 3276 | ATGATGGGCTAGACAT | 34 | 33090 | 33105 | 1582 |
| 826851 | 3275 | 3290 | TTGCTCCAAGCAGGAT | 39 | 33104 | 33119 | 1583 |
| 826852 | 3276 | 3291 | CTTGCTCCAAGCAGGA | 75 | 33105 | 33120 | 1584 |
| 826853 | 3279 | 3294 | CTACTTGCTCCAAGCA | 66 | 33108 | 33123 | 1585 |
| 826854 | 3281 | 3296 | GCCTACTTGCTCCAAG | 53 | 33110 | 33125 | 1586 |
| 826855 | 3292 | 3307 | ATTGAGCTCCTGCCTA | 42 | 33121 | 33136 | 1587 |
| 826858 | N/A | N/A | TACCTCCCCTTGGAAG | 95 | 2717 | 2732 | 1588 |
| 826859 | N/A | N/A | GATACCTCCCCTTGGA | 43 | 2719 | 2734 | 1589 |
| 826868 | N/A | N/A | CCCTTGATACTGCTCA | 48 | N/A | N/A | 1590 |
| 826869 | N/A | N/A | CCCCTTGATACTGCTC | 89 | N/A | N/A | 1591 |
| 826870 | N/A | N/A | TGTTCCCCTTGATACT | 61 | N/A | N/A | 1592 |
| 826871 | N/A | N/A | TTGTTCCCCTTGATAC | 70 | N/A | N/A | 1593 |
| 826872 | N/A | N/A | CTTGTTCCCCTTGATA | 27 | N/A | N/A | 1594 |
| 826873 | N/A | N/A | AGCTTGTTCCCCTTGA | 25 | N/A | N/A | 1595 |
| 826874 | N/A | N/A | CAGCTTGTTCCCCTTG | 40 | N/A | N/A | 1596 |
| 826875 | N/A | N/A | CCAGCTTGTTCCCCTT | 51 | 5161 | 5176 | 1597 |
| 826878 | N/A | N/A | TTGTCCTAGCACCTCC | 25 | 4870 | 4885 | 1598 |
| 826879 | N/A | N/A | GTTTTGTCCTAGCACC | 21 | 4873 | 4888 | 1599 |
| 826888 | N/A | N/A | GATAGGGCCACCTTTC | 31 | 4891 | 4906 | 1600 |
| 826889 | N/A | N/A | CTGATAGGGCCACCTT | 38 | 4893 | 4908 | 1601 |
| 826890 | N/A | N/A | TCCCTGATAGGGCCAC | 24 | 4896 | 4911 | 1602 |
| 826891 | N/A | N/A | CTTCCCTGATAGGGCC | 15 | 4898 | 4913 | 1603 |
| 826892 | N/A | N/A | TGCTTCCCTGATAGGG | 32 | 4900 | 4915 | 1604 |
| 826893 | N/A | N/A | AACGGCCTCTCCTCTG | 18 | 4914 | 4929 | 1605 |
| 826894 | N/A | N/A | GAACGGCCTCTCCTCT | 27 | 4915 | 4930 | 1606 |
| 826895 | N/A | N/A | TAGAACGGCCTCTCCT | 50 | 4917 | 4932 | 1607 |
| 826898 | N/A | N/A | GGCTTCCCTAGAACGG | 44 | 4925 | 4940 | 1608 |
| 826899 | N/A | N/A | CTGGGCTTCCCTAGAA | 47 | 4928 | 4943 | 1609 |
| 826908 | N/A | N/A | GGGCCAAAAGTGCCGG | 49 | 4946 | 4961 | 1610 |
| 826909 | N/A | N/A | GACCTGCGGGAGTTGG | 42 | 4961 | 4976 | 1611 |
| 826910 | N/A | N/A | CAGACCTGCGGGAGTT | 18 | 4963 | 4978 | 1612 |
| 826911 | N/A | N/A | GCAGACCTGCGGGAGT | 26 | 4964 | 4979 | 1613 |
| 826912 | N/A | N/A | GCGCCCACATTCTCCC | 48 | 5015 | 5030 | 1614 |
| 826913 | N/A | N/A | CCTGCGCCCACATTCT | 55 | 5018 | 5033 | 1615 |
| 826914 | N/A | N/A | CCCTGCGCCCACATTC | 68 | 5019 | 5034 | 1616 |
| 826915 | N/A | N/A | CCACCCTGCGCCCACA | 48 | 5022 | 5037 | 1617 |
| 826918 | N/A | N/A | GGAACCCGAGTGAGGC | 30 | 5060 | 5075 | 1618 |
| 826919 | N/A | N/A | TGGAACCCGAGTGAGG | 41 | 5061 | 5076 | 1619 |
| 826928 | N/A | N/A | CCCTTCATGAGCCCCG | 23 | 5150 | 5165 | 1620 |
| 826929 | N/A | N/A | CCCCTTCATGAGCCCC | 42 | 5151 | 5166 | 1621 |
| 826930 | N/A | N/A | AGCTTGTTCCCCTTCA | 23 | 5159 | 5174 | 1622 |
| 826931 | N/A | N/A | CAGCTTGTTCCCCTTC | 35 | 5160 | 5175 | 1623 |
| 826932 | N/A | N/A | CTGCAATAAGGTGCTC | 106 | 2302 | 2317 | 1624 |
| 826933 | N/A | N/A | GGGCATGGTCCTCCCT | 54 | 2316 | 2331 | 1625 |
| 826934 | N/A | N/A | GTCCTTACATTGGGCA | 71 | 2327 | 2342 | 1626 |
| 826935 | N/A | N/A | CCTAGAAACTCCAGTC | 75 | 2356 | 2371 | 1627 |
| 826938 | N/A | N/A | GGCTATCTACTTAGCG | 86 | 2568 | 2583 | 1628 |
| 826939 | N/A | N/A | ATAGGAGCAGAGCTAT | 101 | 2616 | 2631 | 1629 |
| 826948 | N/A | N/A | GTGCAGATCTCAGATT | 58 | 3013 | 3028 | 1630 |
| 826949 | N/A | N/A | ACGGACTTCTAACAAA | 73 | 3030 | 3045 | 1631 |
| 826950 | N/A | N/A | AGGAGATAGGCCTGCA | 73 | 3097 | 3112 | 1632 |
| 826951 | N/A | N/A | ATTGATACACACCGGG | 59 | 3115 | 3130 | 1633 |
| 826952 | N/A | N/A | GTGCAGGAATGTGGTC | 90 | 3185 | 3200 | 1634 |
| 826953 | N/A | N/A | GGGAAGGCTGCCGCTT | 41 | 3231 | 3246 | 1635 |
| 826954 | N/A | N/A | CTGCACGCGGCAGGGA | 62 | 3243 | 3258 | 1636 |
| 826955 | N/A | N/A | AGGAGACTCGGGAGAG | 90 | 3279 | 3294 | 1637 |
| 826958 | N/A | N/A | AAGGAGTGGAGTGCCA | 90 | 3350 | 3365 | 1638 |
| 826959 | N/A | N/A | CCAAACTTAATGCAGC | 54 | 3374 | 3389 | 1639 |
| 826968 | N/A | N/A | CCAAAGGGAGTCTGTC | 59 | 3981 | 3996 | 1640 |
| 826969 | N/A | N/A | GCAAATAGAAGGAGCC | 76 | 4001 | 4016 | 1641 |
| 826970 | N/A | N/A | ACTGAGTGAGTAGAGG | 67 | 4039 | 4054 | 1642 |
| 826971 | N/A | N/A | GGGACAGCGAAGGACA | 54 | 4079 | 4094 | 1643 |
| 826972 | N/A | N/A | ACAATAGAGAGGGACA | 99 | 4089 | 4104 | 1644 |
| 826973 | N/A | N/A | GCCCACAGCTAGGAGG | 66 | 4185 | 4200 | 1645 |
| 826974 | N/A | N/A | AGTAGAAGGATCCTGA | 50 | 4201 | 4216 | 1646 |
| 826975 | N/A | N/A | TGGCAGCCAAACCTCT | 69 | 4509 | 4524 | 1647 |
| 826978 | N/A | N/A | TCCCAGGTTGCGGCTG | 42 | 4555 | 4570 | 1648 |
| 826979 | N/A | N/A | CCTGACCTCGAGCTGT | 38 | 4639 | 4654 | 1649 |
| 826988 | N/A | N/A | CTTATACTTTGCTGGC | 25 | 5994 | 6009 | 1650 |
| 826989 | N/A | N/A | GGTGGACGAGGTCTTA | 27 | 6006 | 6021 | 1651 |
| 826990 | N/A | N/A | CTGCACGGTCTCGCCT | 43 | 6064 | 6079 | 1652 |
| 826991 | N/A | N/A | CCCTAACCTCCACGAT | 73 | 6150 | 6165 | 1653 |
| 826992 | N/A | N/A | CTGTAAGGCCCCTGCC | 43 | 6190 | 6205 | 1654 |
| 826993 | N/A | N/A | GGGCAGGTCAACAGTG | 30 | 6282 | 6297 | 1655 |
| 826994 | N/A | N/A | GTAAAGGTCAGGCACC | 42 | 6299 | 6314 | 1656 |
| 826995 | N/A | N/A | CCGATGAAACCCAAAA | 59 | 6336 | 6351 | 1657 |
| 826998 | N/A | N/A | CGCTTACCACCTGCTC | 38 | 6383 | 6398 | 1658 |
| 826999 | N/A | N/A | AGGTATACAAAAGCAC | 98 | 6425 | 6440 | 1659 |
| 827008 | N/A | N/A | GTACACTAACTCACCA | 53 | 6657 | 6672 | 1660 |
| 827009 | N/A | N/A | AAAGATTTTGCACTCC | 42 | 6679 | 6694 | 1661 |
| 827010 | N/A | N/A | ACCCACACCCATAAAG | 98 | 6691 | 6706 | 1662 |
| 827011 | N/A | N/A | TACCAATATGTGCACA | 44 | 6718 | 6733 | 1663 |
| 827012 | N/A | N/A | TCGCACACATACCAAT | 78 | 6727 | 6742 | 1664 |
| 827013 | N/A | N/A | CAGCATCCAAAATCGC | 44 | 6739 | 6754 | 1665 |
| 827014 | N/A | N/A | ACCCACAGCATGACCA | 68 | 6760 | 6775 | 1666 |
| 827015 | N/A | N/A | ATGGAATATACGAAGG | 35 | 6783 | 6798 | 1667 |
| 827018 | N/A | N/A | ACGAAATGACCTGGCT | 35 | 6870 | 6885 | 1668 |
| 827019 | N/A | N/A | GGACATTATACAGACG | 30 | 6893 | 6908 | 1669 |
| 827028 | N/A | N/A | CACCAAGGCCTAAAGG | 62 | 7268 | 7283 | 1670 |
| 827029 | N/A | N/A | GGCCTCACCCGATTCA | 47 | 7395 | 7410 | 1671 |
| 827030 | N/A | N/A | TAAGAACTGTGCAGGC | 5 | 7408 | 7423 | 1672 |
| 827031 | N/A | N/A | GTCTAGGGCCCCGCAT | 47 | 7435 | 7450 | 1673 |
| 827032 | N/A | N/A | GGGCTTATGGCTTCCT | 42 | 7473 | 7488 | 1674 |
| 827033 | N/A | N/A | CTCCTAGGTGTTCTCT | 38 | 7576 | 7591 | 1675 |
| 827034 | N/A | N/A | TGCTTGGTGGGTGTTG | 53 | 7638 | 7653 | 1676 |
| 827035 | N/A | N/A | GTCAAGTGTGTAGTGC | 14 | 7651 | 7666 | 1677 |
| 827038 | N/A | N/A | GCTTTAGGGTGTAGCA | 76 | 7684 | 7699 | 1678 |
| 827039 | N/A | N/A | GTCTATAAAGCACCCA | 36 | 7700 | 7715 | 1679 |
| 827048 | N/A | N/A | GCTAACCTGAGATGCC | 64 | 8501 | 8516 | 1680 |
| 827049 | N/A | N/A | CACTAGGTTTGTGACT | 82 | 8522 | 8537 | 1681 |
| 827050 | N/A | N/A | AATCAAACACACTAGG | 46 | 8531 | 8546 | 1682 |
| 827051 | N/A | N/A | GGGTAAAAGAGCTTTG | 25 | 8548 | 8563 | 1683 |
| 827052 | N/A | N/A | CCCTACTTAAAGTGTA | 83 | 8566 | 8581 | 1684 |
| 827053 | N/A | N/A | CCTGACAAATTGTCCT | 26 | 8651 | 8666 | 1685 |
| 827054 | N/A | N/A | TTAACCTGTTTACCTC | 38 | 8717 | 8732 | 1686 |
| 827055 | N/A | N/A | TCCCGGTGATTCACTC | 61 | 8744 | 8759 | 1687 |
| 827058 | N/A | N/A | AACCGATCTCCTCGGT | 110 | 8778 | 8793 | 1688 |
| 827059 | N/A | N/A | CTCTAGCTCATCAACC | 69 | 8790 | 8805 | 1689 |
| 827068 | N/A | N/A | CCCTAGCTCAGGGCTT | 48 | 9259 | 9274 | 1690 |
| 827069 | N/A | N/A | ACAGGCAGGGACGGCC | 32 | 9276 | 9291 | 1691 |
| 827070 | N/A | N/A | ATGCAGGGTCTGCCCG | 42 | 9307 | 9322 | 1692 |
| 827071 | N/A | N/A | CTCAACAGTCCAGGCT | 29 | 9376 | 9391 | 1693 |
| 827072 | N/A | N/A | GGTTAGAGGGATGTCA | 48 | 9395 | 9410 | 1694 |
| 827073 | N/A | N/A | CACCATGGCAGGGTTA | 45 | 9406 | 9421 | 1695 |
| 827074 | N/A | N/A | AGCCGCCTAGGCCCCA | 40 | 9449 | 9464 | 1696 |
| 827075 | N/A | N/A | GCCCATGCTCATCCTA | 62 | 9476 | 9491 | 1697 |
| 827078 | N/A | N/A | CCAGGACGGAGCAGCA | 60 | 9585 | 9600 | 1698 |
| 827079 | N/A | N/A | AACTAGGCAAATTCCC | 41 | 9775 | 9790 | 1699 |
| 827088 | N/A | N/A | TAGAAATTCCTATAGC | 46 | 10104 | 10119 | 1700 |
| 827089 | N/A | N/A | CATGACCCCGTGATAC | 50 | 10120 | 10135 | 1701 |
| 827090 | N/A | N/A | TATGATAAATTAGCCG | 57 | 10310 | 10325 | 1702 |
| 827091 | N/A | N/A | GACGGAATGGCCGGGC | 24 | 10443 | 10458 | 1703 |
| 827092 | N/A | N/A | TGGCATAAGATAAGAC | 34 | 10456 | 10471 | 1704 |
| 827093 | N/A | N/A | CCAAAAGGTCTACTGC | 30 | 10482 | 10497 | 1705 |
| 827094 | N/A | N/A | TTCCATAGGGCCCCAC | 50 | 10508 | 10523 | 1706 |
| 827095 | N/A | N/A | CACTGATGAGCCCCCC | 82 | 10601 | 10616 | 1707 |
| 827098 | N/A | N/A | CCTGCCACCCTACGCG | 44 | 10636 | 10651 | 1708 |
| 827099 | N/A | N/A | TCCTGCCACCCTACGC | 46 | 10637 | 10652 | 1709 |
| | | | | | 10660 | 10675 | |
| | | | | | 10683 | 10698 | |
| 827108 | N/A | N/A | CCCTACACGCCTCCCT | 56 | 10721 | 10736 | 1710 |
| 827109 | N/A | N/A | TCAATCTGGTTGTCAC | 55 | 10812 | 10827 | 1711 |
| 827110 | N/A | N/A | TCTCATCACCAACTTC | 42 | 10826 | 10841 | 1712 |
| 827111 | N/A | N/A | AAGAATCCAGATCCCC | 36 | 10943 | 10958 | 1713 |
| 827112 | N/A | N/A | AGCGAATTTGCCTTTC | 34 | 10974 | 10989 | 1714 |
| 827113 | N/A | N/A | GCCCAGGAAAGCGAAT | 55 | 10983 | 10998 | 1715 |
| 827114 | N/A | N/A | TCGACTATCAGGAAGA | 42 | 11015 | 11030 | 1716 |
| 827115 | N/A | N/A | GTGAAGAGACCATCGA | 41 | 11027 | 11042 | 1717 |
| 827118 | N/A | N/A | GGGTAAGTGACCCAGC | 48 | 11154 | 11169 | 1718 |
| 827119 | N/A | N/A | GAAAGAGCACCCAAGC | 51 | 11233 | 11248 | 1719 |
| 827128 | N/A | N/A | TACCGTTAGCCACTGT | 30 | 11418 | 11433 | 1720 |
| 827129 | N/A | N/A | CTTCAGTGTAACACAG | 41 | 11436 | 11451 | 1721 |
| 827130 | N/A | N/A | CTTTAGGACAAACTTT | 62 | 11503 | 11518 | 1722 |
| 827131 | N/A | N/A | TCACTATGCATGAAGA | 14 | 11522 | 11537 | 1723 |
| 827132 | N/A | N/A | ATCTAGTTAGGTGGCA | 32 | 11540 | 11555 | 1724 |
| 827133 | N/A | N/A | AGGTAGGTTATAGTGT | 22 | 11564 | 11579 | 1725 |
| 827134 | N/A | N/A | TGCTATAAAGGTAGGT | 18 | 11572 | 11587 | 1726 |
| 827135 | N/A | N/A | TGACAAGTGGGCTGCC | 44 | 11612 | 11627 | 1727 |
| 827138 | N/A | N/A | GTACAGAAACACCCGG | 63 | 11669 | 11684 | 1728 |
| 827139 | N/A | N/A | AACGGAAGTAAGGTAC | 47 | 11681 | 11696 | 1729 |
| 827148 | N/A | N/A | CGTTTATCGAGCACTT | 13 | 11915 | 11930 | 1730 |
| 827149 | N/A | N/A | GGCAAGCATAGCTAGC | 18 | 11930 | 11945 | 1731 |
| 827150 | N/A | N/A | GTGTGTTTGGCATTCT | 7 | 11980 | 11995 | 1732 |
| | | | | | 13086 | 13101 | |
| 827151 | N/A | N/A | GGTGTGTTTGGCATTC | 12 | 11981 | 11996 | 1733 |
| 827152 | N/A | N/A | AGGTGTGTTTGGCATT | 29 | 11982 | 11997 | 1734 |
| 827153 | N/A | N/A | GCCTTAGGCATCAGCT | 25 | 12045 | 12060 | 1735 |
| 827154 | N/A | N/A | GTCTAGCTGGCTGGGC | 42 | 12059 | 12074 | 1736 |
| 827155 | N/A | N/A | AACCACCGTCTAGTCC | 42 | 12126 | 12141 | 1737 |
| 827158 | N/A | N/A | CCAGAACAAGGTTGTT | 56 | 12181 | 12196 | 1738 |
| 827159 | N/A | N/A | TCAGATTTAATGGGTC | 43 | 12207 | 12222 | 1739 |
| 827168 | N/A | N/A | AACCAGTTGATAGAGA | 44 | 12409 | 12424 | 1740 |
| 827169 | N/A | N/A | ATACGAATTCTATGAA | 80 | 12432 | 12447 | 1741 |
| 827170 | N/A | N/A | TCCCATTTATACGAAT | 57 | 12440 | 12455 | 1742 |
| 827171 | N/A | N/A | CCAGAATAGGCTCATC | 33 | 12570 | 12585 | 1743 |
| 827172 | N/A | N/A | GCTCAAATCAGGCAGC | 89 | 12593 | 12608 | 1744 |
| 827173 | N/A | N/A | GCAAAGAACGATGCTC | 46 | 12605 | 12620 | 1745 |
| 827174 | N/A | N/A | TAACAGAGTTGACTTG | 100 | 12622 | 12637 | 1746 |
| 827175 | N/A | N/A | TGGTATTAGAATGTGC | 18 | 12681 | 12696 | 1747 |
| 827178 | N/A | N/A | ACGACGAAACCTTGTA | 48 | 12932 | 12947 | 1748 |
| 827179 | N/A | N/A | GTGTTTGGCATTCTAG | 19 | 13084 | 13099 | 1749 |
| 827188 | N/A | N/A | ACCATATAACCCATCC | 30 | 13715 | 13730 | 1750 |
| 827189 | N/A | N/A | ATGATACGATCATTTT | 34 | 13774 | 13789 | 1751 |
| 827190 | N/A | N/A | CTGTACACAGCTAGTG | 30 | 13800 | 13815 | 1752 |
| 827191 | N/A | N/A | CGAACAGACCTACATT | 41 | 13833 | 13848 | 1753 |
| 827192 | N/A | N/A | CCGAACAGACCTACAT | 32 | 13834 | 13849 | 1754 |
| 827193 | N/A | N/A | AGCCGAACAGACCTAC | 42 | 13836 | 13851 | 1755 |
| 827194 | N/A | N/A | TGAACAGACCTACATT | 52 | 14130 | 14145 | 1756 |
| 827195 | N/A | N/A | ATGAACAGACCTACAT | 60 | 14131 | 14146 | 1757 |
| 827198 | N/A | N/A | AGTAGGCACTTTATGA | 55 | 14143 | 14158 | 1758 |
| 827199 | N/A | N/A | CCGTATGTAGTAGGCA | 24 | 14151 | 14166 | 1759 |
| 827207 | N/A | N/A | CTAGAACAACCGTATG | 29 | 14160 | 14175 | 1760 |
| 827208 | N/A | N/A | CCTAGAACAACCGTAT | 34 | 14161 | 14176 | 1761 |
| 827209 | N/A | N/A | CCCTAGAACAACCGTA | 30 | 14162 | 14177 | 1762 |
| 827210 | N/A | N/A | TCCCTAGAACAACCGT | 21 | 14163 | 14178 | 1763 |
| 827211 | N/A | N/A | TGGAAGATATCTTCCT | 90 | 14229 | 14244 | 1764 |
| 827212 | N/A | N/A | CCTTATGCTATACAGG | 43 | 14311 | 14326 | 1765 |
| 827213 | N/A | N/A | GAATACTGTATTGGAA | 43 | 14349 | 14364 | 1766 |
| 827214 | N/A | N/A | TGTTAGCAGGTTCTGC | 48 | 14375 | 14390 | 1767 |
| 827217 | N/A | N/A | ACAATGCGGTTCTTGG | 38 | 14507 | 14522 | 1768 |
| 827218 | N/A | N/A | CTAAGACTTATCTGGA | 48 | 14629 | 14644 | 1769 |
| 827227 | N/A | N/A | TGCATTTAGGCCGGGT | 46 | 15520 | 15535 | 1770 |
| 827228 | N/A | N/A | TTGCAGGGTACACAAC | 51 | 15557 | 15572 | 1771 |
| 827229 | N/A | N/A | CTGAACAAGGTTGCAG | 46 | 15567 | 15582 | 1772 |
| 827230 | N/A | N/A | TAGAACTAACAAACTG | 53 | 15580 | 15595 | 1773 |
| 827231 | N/A | N/A | GGCCTGAGGGATGTCA | 52 | 15617 | 15632 | 1774 |
| 827232 | N/A | N/A | CATCATGAAAGTCCAG | 39 | 15641 | 15656 | 1775 |
| 827233 | N/A | N/A | CACCGAAATCAAGAGT | 58 | 15834 | 15849 | 1776 |
| 827234 | N/A | N/A | TGCCGCTTGGCACCGA | 96 | 15844 | 15859 | 1777 |
| 827237 | N/A | N/A | ACCCAGGTCATCCCGC | 106 | 15902 | 15917 | 1778 |
| 827238 | N/A | N/A | ACCCGGAACTTGTCTG | 45 | 15971 | 15986 | 1779 |
| 827247 | N/A | N/A | CCCAAAAGCTTGGGCA | 40 | 16752 | 16767 | 1780 |
| 827248 | N/A | N/A | ACATAGGACCCCAGGG | 37 | 16775 | 16790 | 1781 |
| 827249 | N/A | N/A | TCCCACTAGTGGGCAC | 53 | 16919 | 16934 | 1782 |
| 827250 | N/A | N/A | TCCTAACTGAGTCCCA | 32 | 16930 | 16945 | 1783 |
| 827251 | N/A | N/A | TCACGCTGGAGGGTCC | 31 | 16943 | 16958 | 1784 |
| 827252 | N/A | N/A | TGTTAGCCCAGTTCTC | 44 | 16961 | 16976 | 1785 |
| 827253 | N/A | N/A | CTATCTTGGGCTGTTA | 93 | 16972 | 16987 | 1786 |
| 827254 | N/A | N/A | GGCAGACGAGCTCACT | 11 | 17288 | 17303 | 1787 |
| 827257 | N/A | N/A | GACTGAGGGATCAAGA | 44 | 17431 | 17446 | 1788 |
| 827258 | N/A | N/A | TGCCTAGGGTGGAAGG | 42 | 17481 | 17496 | 1789 |
| 827267 | N/A | N/A | GACTAGAGTCAGAGGG | 43 | 17733 | 17748 | 1790 |
| 827268 | N/A | N/A | TCTGGTTGCACTGGAC | 28 | 17754 | 17769 | 1791 |
| 827269 | N/A | N/A | TTCTGGTTGCACTGGA | 38 | 17755 | 17770 | 1792 |
| 827270 | N/A | N/A | GTTCTGGTTGCACTGG | 15 | 17756 | 17771 | 1793 |
| 827271 | N/A | N/A | TGTTCTGGTTGCACTG | 37 | 17757 | 17772 | 1794 |
| 827272 | N/A | N/A | TTGTTCTGGTTGCACT | 32 | 17758 | 17773 | 1795 |
| 827273 | N/A | N/A | GCGGACCCCGCGGAGA | 39 | 17978 | 17993 | 1796 |
| 827274 | N/A | N/A | ACCCAGGGAAGCGGAC | 60 | 17988 | 18003 | 1797 |
| 827277 | N/A | N/A | ATCCATGCTTCCAGCC | 14 | 18214 | 18229 | 1798 |
| 827278 | N/A | N/A | GATCCATGCTTCCAGC | 19 | 18215 | 18230 | 1799 |
| 827286 | N/A | N/A | AAAGACCAAGATCCAT | 19 | 18224 | 18239 | 1800 |
| 827287 | N/A | N/A | GGCCTTAGAAAGACCA | 86 | 18551 | 18566 | 1801 |
| 827288 | N/A | N/A | AGCTTTGATGCTAGGG | 16 | 18574 | 18589 | 1802 |
| 827289 | N/A | N/A | GACAGATGATCTCCTA | 11 | 18600 | 18615 | 1803 |
| 827290 | N/A | N/A | CCTCACTACTACTGCC | 21 | 18643 | 18658 | 1804 |
| 827291 | N/A | N/A | CCTCAACCCATGCCAC | 51 | 18663 | 18678 | 1805 |
| 827292 | N/A | N/A | ACTTAGGTTTAGTCCC | 36 | 18677 | 18692 | 1806 |
| 827293 | N/A | N/A | AGCTAGAGTGGGAACT | 44 | 18690 | 18705 | 1807 |
| 827296 | N/A | N/A | TGATACATCCAGAGTC | 42 | 18726 | 18741 | 1808 |
| 827297 | N/A | N/A | ATGATGTGATACATCC | 58 | 18732 | 18747 | 1809 |
| 827305 | N/A | N/A | ACACACTTGGTACAGC | 23 | 18964 | 18979 | 1810 |
| 827306 | N/A | N/A | GGTCTATAAAGTGCCC | 23 | 18995 | 19010 | 1811 |
| 827307 | N/A | N/A | AGAGTAATGAAACCCA | 5 | 19022 | 19037 | 1812 |
| 827308 | N/A | N/A | CTTCACCTGTTTGAGT | 32 | 19041 | 19056 | 1813 |
| 827309 | N/A | N/A | TCCTTAGCCAGGGCCG | 15 | 19079 | 19094 | 1814 |
| 827310 | N/A | N/A | AATGAATACCCGAGGG | 25 | 19113 | 19128 | 1815 |
| 827311 | N/A | N/A | GGACATTATAACAGGG | 28 | 19139 | 19154 | 1816 |
| 827312 | N/A | N/A | CTGCTATGAGCTGCTT | 71 | 19159 | 19174 | 1817 |
| 827315 | N/A | N/A | CTGTAGAGTGGAGCCA | 44 | 19305 | 19320 | 1818 |
| 827316 | N/A | N/A | AGGGAATGCCCCCTGT | 95 | 19317 | 19332 | 1819 |
| 827325 | N/A | N/A | GGCATAGGGAAAGCAC | 30 | 19542 | 19557 | 1820 |
| | | | | | 19624 | 19639 | |
| 827326 | N/A | N/A | GAGGCATCGGGTGAGG | 47 | 19557 | 19572 | 1821 |
| 827327 | N/A | N/A | GGACTTTCTGTTGATG | 21 | 19598 | 19613 | 1822 |
| 827328 | N/A | N/A | TGGACTTTCTGTTGAT | 29 | 19599 | 19614 | 1823 |
| 827329 | N/A | N/A | CCATGGACTTTCTGTT | 32 | 19602 | 19617 | 1824 |
| | | | | | 19685 | 19700 | |
| 827330 | N/A | N/A | TCCATGGACTTTCTGT | 28 | 19603 | 19618 | 1825 |
| 827331 | N/A | N/A | GTCCATGGACTTTCTG | 41 | 19604 | 19619 | 1826 |
| 827332 | N/A | N/A | GGACTTTCTGTTGAGG | 30 | 19681 | 19696 | 1827 |
| 827335 | N/A | N/A | CGCCTAAGTGCCAAGA | 26 | 19711 | 19726 | 1828 |
| 827336 | N/A | N/A | AGCAATGAGGCTCTGA | 30 | 19738 | 19753 | 1829 |
| 827345 | N/A | N/A | ATAGTTACATGTGGTG | 25 | 19863 | 19878 | 1830 |
| 827346 | N/A | N/A | AATAGTTACATGTGGT | 30 | 19864 | 19879 | 1831 |
| 827347 | N/A | N/A | GAATAGTTACATGTGG | 13 | 19865 | 19880 | 1832 |
| 827348 | N/A | N/A | TGGAATAGTTACATGT | 18 | 19867 | 19882 | 1833 |
| 827349 | N/A | N/A | CTGGAATAGTTACATG | 25 | 19868 | 19883 | 1834 |
| 827350 | N/A | N/A | ACTGGAATAGTTACAT | 47 | 19869 | 19884 | 1835 |
| 827351 | N/A | N/A | TAACTGGAATAGTTAC | 93 | 19871 | 19886 | 1836 |
| 827354 | N/A | N/A | GACTAACTGGAATAGT | 73 | 19874 | 19889 | 1837 |
| 827355 | N/A | N/A | GGACTAACTGGAATAG | 33 | 19875 | 19890 | 1838 |
| 827364 | N/A | N/A | GGAGGATACAGTTTGG | 32 | 20588 | 20603 | 1839 |
| 827365 | N/A | N/A | ACACTGAACGATTTTA | 32 | 20608 | 20623 | 1840 |
| 827366 | N/A | N/A | CTGGAGGCCGTGAGAG | 45 | 20624 | 20639 | 1841 |
| 827367 | N/A | N/A | ACCAACTTGATGCTGG | 51 | 20636 | 20651 | 1842 |
| 827368 | N/A | N/A | GGTGAGAAAGCCATGC | 17 | 20660 | 20675 | 1843 |
| 827369 | N/A | N/A | GAAAAGGGTGTAGTTA | 35 | 20690 | 20705 | 1844 |
| 827370 | N/A | N/A | AAACAGGTAGTGGTAA | 27 | 20826 | 20841 | 1845 |
| 827371 | N/A | N/A | GTGAAATGTCCACCAC | 38 | 20962 | 20977 | 1846 |
| 827374 | N/A | N/A | GCAAAAATGTGGGCCG | 50 | 21420 | 21435 | 1847 |
| 827375 | N/A | N/A | TCCATGTACAGGATCC | 38 | 21529 | 21544 | 1848 |
| 827383 | N/A | N/A | TAAGATGGCTAAAGTC | 13 | 21733 | 21748 | 1849 |
| 827384 | N/A | N/A | GGATTCATTAAGATGG | 23 | 21741 | 21756 | 1850 |
| 827385 | N/A | N/A | GGGATTCATTAAGATG | 31 | 21742 | 21757 | 1851 |
| 827386 | N/A | N/A | AGGGATTCATTAAGAT | 14 | 21743 | 21758 | 1852 |
| 827387 | N/A | N/A | CAGGGATTCATTAAGA | 30 | 21744 | 21759 | 1853 |
| 827388 | N/A | N/A | ACAGGGATTCATTAAG | 38 | 21745 | 21760 | 1854 |
| 827389 | N/A | N/A | TACAGGGATTCATTAA | 42 | 21746 | 21761 | 1855 |
| 827390 | N/A | N/A | TTACAGGGATTCATTA | 55 | 21747 | 21762 | 1856 |
| 827393 | N/A | N/A | TACGATTACAGGGATT | 11 | 21752 | 21767 | 1857 |
| 827402 | N/A | N/A | GCTCACTAGTACGATT | 43 | 21761 | 21776 | 1858 |
| 827403 | N/A | N/A | AGCTCACTAGTACGAT | 46 | 21762 | 21777 | 1859 |
| 827404 | N/A | N/A | GCCTTAGTAAGAGCTG | 29 | 21782 | 21797 | 1860 |
| 827405 | N/A | N/A | AGTTACTTACTTAATC | 28 | 21896 | 21911 | 1861 |
| 827406 | N/A | N/A | GACCAAACAAGTTACT | 21 | 21905 | 21920 | 1862 |
| 827407 | N/A | N/A | GGACCAAACAAGTTAC | 27 | 21906 | 21921 | 1863 |
| 827408 | N/A | N/A | ATTAGATGTGGGACCA | 17 | 21916 | 21931 | 1864 |
| 827411 | N/A | N/A | TATGAGAATCAGTATA | 56 | 22311 | 22326 | 1865 |
| 827412 | N/A | N/A | CTATGAGAATCAGTAT | 44 | 22312 | 22327 | 1866 |
| 827420 | N/A | N/A | GGAGAAACACGGATGG | 10 | 22743 | 22758 | 1867 |
| 827421 | N/A | N/A | TTCCATCAGCGGTGGA | 52 | 22756 | 22771 | 1868 |
| 827422 | N/A | N/A | GGCACAAGTTCCATCA | 23 | 22764 | 22779 | 1869 |
| 827423 | N/A | N/A | AGGCACAAGTTCCATC | 34 | 22765 | 22780 | 1870 |
| 827424 | N/A | N/A | CAGGCACAAGTTCCAT | 32 | 22766 | 22781 | 1871 |
| 827425 | N/A | N/A | GCAGGCACAAGTTCCA | 19 | 22767 | 22782 | 1872 |
| 827426 | N/A | N/A | AGCAGGCACAAGTTCC | 14 | 22768 | 22783 | 1873 |
| 827427 | N/A | N/A | AAGCAGGCACAAGTTC | 44 | 22769 | 22784 | 1874 |
| 827430 | N/A | N/A | GTGCTGCCCCCATGGA | 37 | 22785 | 22800 | 1875 |
| 827431 | N/A | N/A | GGGACAAGTATAATGG | 58 | 22804 | 22819 | 1876 |
| 827440 | N/A | N/A | AAGCAGGTCATTGTTT | 28 | 23071 | 23086 | 1877 |
| 827441 | N/A | N/A | TGGTTGTACGGTCTCA | 19 | 23086 | 23101 | 1878 |
| 827442 | N/A | N/A | GCAAAGACGGAAAGGG | 34 | 23180 | 23195 | 1879 |
| 827443 | N/A | N/A | GCGACGGGAGCCAGGC | 36 | 23194 | 23209 | 1880 |
| 827444 | N/A | N/A | CTTGGAGCTAGCGACG | 20 | 23204 | 23219 | 1881 |
| 827445 | N/A | N/A | TGCTACCCTGCCATCT | 24 | 23218 | 23233 | 1882 |
| 827446 | N/A | N/A | TGCCACACGGCACAGA | 64 | 23248 | 23263 | 1883 |
| 827447 | N/A | N/A | GCAAATCACAGGTTCC | 19 | 23302 | 23317 | 1884 |
| 827449 | N/A | N/A | CATCAGTATGTCTCAG | 18 | 23412 | 23427 | 1885 |
| 827450 | N/A | N/A | GAGGAAGATCAGTACC | 39 | 23451 | 23466 | 1886 |
| 827459 | N/A | N/A | CCCTAACTGCCCATGC | 20 | 23711 | 23726 | 1887 |
| 827460 | N/A | N/A | CGGCATTGACTTCCGT | 48 | 23775 | 23790 | 1888 |
| 827461 | N/A | N/A | TCACACATCTACCTTC | 34 | 23828 | 23843 | 1889 |
| 827462 | N/A | N/A | TTTACTCACACTCCCT | 24 | 23936 | 23951 | 1890 |
| 827463 | N/A | N/A | CCTACAGGACTTGTGC | 26 | 24009 | 24024 | 1891 |
| 827464 | N/A | N/A | AGAGAGAGTAGGGTCA | 64 | 24094 | 24109 | 1892 |
| 827465 | N/A | N/A | TGAGAGTAATTCCTTA | 50 | 24117 | 24132 | 1893 |
| 827466 | N/A | N/A | CACCGTTGTTGATTCC | 39 | 24212 | 24227 | 1894 |
| 827469 | N/A | N/A | GCTCAAGGTAAGTACA | 55 | 24276 | 24291 | 1895 |
| 827470 | N/A | N/A | GCTCTAGGAGGTGAGC | 83 | 24290 | 24305 | 1896 |
| 827479 | N/A | N/A | TCCTACTGGCCTCGCC | 49 | 25036 | 25051 | 1897 |
| 827480 | N/A | N/A | TTCCAGGTTGTATCTC | 53 | 25067 | 25082 | 1898 |
| 827481 | N/A | N/A | ACATACACCAAGAGAT | 16 | 25127 | 25142 | 1899 |
| 827482 | N/A | N/A | CCTATGAACCCACATA | 107 | 25138 | 25153 | 1900 |
| 827483 | N/A | N/A | GGCTGCCACGGAATCA | 50 | 25265 | 25280 | 1901 |
| 827484 | N/A | N/A | ATACACAACCCCTCCA | 104 | 25316 | 25331 | 1902 |
| 827485 | N/A | N/A | GTGAATACACACCTGG | 48 | 25442 | 25457 | 1903 |
| 827486 | N/A | N/A | CCTCAGTGAGTACTGG | 52 | 25602 | 25617 | 1904 |
| 827489 | N/A | N/A | GCCTGCAGGTTGTTTT | 56 | 26100 | 26115 | 1905 |
| 827490 | N/A | N/A | TGAGGAACCGCTGGAG | 41 | 26479 | 26494 | 1906 |
| 827499 | N/A | N/A | TCCAAACTTTACTGAT | 41 | 26787 | 26802 | 1907 |
| 827500 | N/A | N/A | TAAGGAGGAGATTCCA | 38 | 26809 | 26824 | 1908 |
| 827501 | N/A | N/A | GTCCTATACCAGGATA | 47 | 26823 | 26838 | 1909 |
| 827502 | N/A | N/A | AGAGATTTGTCTAGTC | 12 | 26836 | 26851 | 1910 |
| 827503 | N/A | N/A | ACTCAACTGTAGTCAA | 36 | 26858 | 26873 | 1911 |
| 827504 | N/A | N/A | TGGCACACGACTTCCC | 28 | 26883 | 26898 | 1912 |
| 827505 | N/A | N/A | TGCAAACCCTTGCAGC | 80 | 26942 | 26957 | 1913 |
| 827506 | N/A | N/A | CACTACCATGTCCCCT | 60 | 27075 | 27090 | 1914 |
| 827509 | N/A | N/A | TGCGGAGCCAGCCCAG | 43 | 27202 | 27217 | 1915 |
| 827510 | N/A | N/A | CACGACTGGAAAGTCC | 42 | 27232 | 27247 | 1916 |
| 827519 | N/A | N/A | TAATGGAACTGTAGAT | 31 | 27734 | 27749 | 1917 |
| 827520 | N/A | N/A | TATATGATGATTGCAC | 35 | 27883 | 27898 | 1918 |
| 827521 | N/A | N/A | TGCCTGGCTTGAGTGA | 47 | 27944 | 27959 | 1919 |
| 827522 | N/A | N/A | GAGTACAAGGTTTATT | 22 | 28237 | 28252 | 1920 |
| 827523 | N/A | N/A | TGAGTACAAGGTTTAT | 26 | 28238 | 28253 | 1921 |
| 827524 | N/A | N/A | ATGAGTACAAGGTTTA | 7 | 28239 | 28254 | 1922 |
| 827525 | N/A | N/A | GACTTGCTAATGAGTA | 36 | 28248 | 28263 | 1923 |
| 827526 | N/A | N/A | GGACTTGCTAATGAGT | 58 | 28249 | 28264 | 1924 |
| 827529 | N/A | N/A | TTGGGACTTGCTAATG | 53 | 28252 | 28267 | 1925 |
| 827530 | N/A | N/A | GCTTGGGACTTGCTAA | 43 | 28254 | 28269 | 1926 |
| 827538 | N/A | N/A | TTGCTACCATACGGAT | 23 | 28747 | 28762 | 1927 |
| 827539 | N/A | N/A | ATTGCTACCATACGGA | 38 | 28748 | 28763 | 1928 |
| 827540 | N/A | N/A | TATTGCTACCATACGG | 31 | 28749 | 28764 | 1929 |
| 827541 | N/A | N/A | CTATTGCTACCATACG | 17 | 28750 | 28765 | 1930 |
| 827542 | N/A | N/A | GCTATTGCTACCATAC | 31 | 28751 | 28766 | 1931 |
| 827543 | N/A | N/A | CTGCTATTGCTACCAT | 25 | 28753 | 28768 | 1932 |
| 827544 | N/A | N/A | AGGCACTGCTATTGCT | 42 | 28758 | 28773 | 1933 |
| 827545 | N/A | N/A | CCATACAAGGGAGTGT | 66 | 28799 | 28814 | 1934 |
| 827548 | N/A | N/A | TGCTGCTAGGGATGTA | 45 | 29051 | 29066 | 1935 |
| 827549 | N/A | N/A | ACCCATTAAGATGTGT | 92 | 29468 | 29483 | 1936 |
| 827558 | N/A | N/A | CCACACCCAAGAGGTC | 42 | 30527 | 30542 | 1937 |
| 827559 | N/A | N/A | TCCTAGGGCACCTCAG | 100 | 30554 | 30569 | 1938 |
| 827560 | N/A | N/A | TAGCAGTACCCTGTGG | 56 | 30590 | 30605 | 1939 |
| 827561 | N/A | N/A | GGACACTAACCTGCAT | 47 | 30669 | 30684 | 1940 |
| 827562 | N/A | N/A | ACCCAACCTGTACCCG | 57 | 30692 | 30707 | 1941 |
| 827563 | N/A | N/A | GGCTCGGTAACCTGTA | 56 | 30712 | 30727 | 1942 |
| 827564 | N/A | N/A | TCCCAAATGCTTGGCT | 58 | 30724 | 30739 | 1943 |
| 827565 | N/A | N/A | GGCCACAGCATTACAT | 100 | 30879 | 30894 | 1944 |
| 827568 | N/A | N/A | GGCTTACAGGGATAGG | 61 | 30934 | 30949 | 1945 |
| 827569 | N/A | N/A | CCCATATGCTTCAGGC | 61 | 30947 | 30962 | 1946 |
| 827578 | N/A | N/A | CCGACAGCCGCCCTGC | 43 | 31323 | 31338 | 1947 |
| 827579 | N/A | N/A | GGCCGAGCTCCTTCTT | 71 | 31435 | 31450 | 1948 |
| 827580 | N/A | N/A | ACCTTATGCCCCGGCC | 56 | 31447 | 31462 | 1949 |
| 827581 | N/A | N/A | CCCCAGAGACCTTATG | 69 | 31455 | 31470 | 1950 |
| 827582 | N/A | N/A | ACTGATAACTGGCCCA | 58 | 31549 | 31564 | 1951 |
| 827583 | N/A | N/A | CACCAAGCTGTCTCCC | 50 | 31655 | 31670 | 1952 |
| 827584 | N/A | N/A | GACGATGGGACAGAGG | 76 | 31711 | 31726 | 1953 |
| 827585 | N/A | N/A | GAGGAGAGGTACATTG | 60 | 31726 | 31741 | 1954 |

TABLE 5
Percent level of human α-ENaC mRNA

| | SEQ | SEQ | | | SEQ | SEQ | |
|---|---|---|---|---|---|---|---|
| Compound | ID: 1 | ID: 1 | | α-ENaC | ID: 2 | ID 2: | SEQ |
| Number | Start Site | Stop Site | Sequence | (% control) | Start Site | Stop Site | ID NO |
| 797469 | N/A | N/A | GGATGATGTGATACAT | 5 | 18734 | 18749 | 400 |
| 797524 | N/A | N/A | ACCATACGGATGAACC | 23 | 28742 | 28757 | 455 |
| 826071 | 5 | 20 | TTTAGACGCAGACAGG | 85 | 4266 | 4281 | 466 |
| 826074 | 25 | 40 | GGCGGACTCTGGGCAG | 74 | 4286 | 4301 | 611 |
| 826075 | 28 | 43 | GAAGGCGGACTCTGGG | 81 | 4289 | 4304 | 612 |
| 826076 | 29 | 44 | AGAAGGCGGACTCTGG | 82 | 4290 | 4305 | 613 |
| 826077 | 31 | 46 | TGAGAAGGCGGACTCT | 85 | 4292 | 4307 | 614 |
| 826078 | 32 | 47 | CTGAGAAGGCGGACTC | 70 | 4293 | 4308 | 615 |
| 826079 | 33 | 48 | CCTGAGAAGGCGGACT | 79 | 4294 | 4309 | 616 |
| 826091 | 53 | 68 | GGTGAACTGGGAGTAC | 111 | 4314 | 4329 | 468 |
| 826094 | 73 | 88 | AAGGAGGGCTCCCGAG | 66 | 4334 | 4349 | 618 |
| 826095 | 74 | 89 | GAAGGAGGGCTCCCGA | 90 | 4335 | 4350 | 619 |
| 826096 | 81 | 96 | TCCGAAGGAAGGAGGG | 81 | 4342 | 4357 | 620 |
| 826097 | 83 | 98 | TTTCCGAAGGAAGGAG | 95 | 4344 | 4359 | 621 |
| 826098 | 85 | 100 | GTTTTCCGAAGGAAGG | 69 | 4346 | 4361 | 622 |
| 826099 | 88 | 103 | GGAGTTTTCCGAAGGA | 105 | 4349 | 4364 | 623 |
| 826111 | 163 | 178 | GCGACAGGAATCTCAT | 90 | 4424 | 4439 | 470 |
| 826114 | 167 | 182 | GGAAGCGACAGGAATC | 60 | 4428 | 4443 | 626 |
| 826115 | 169 | 184 | ATGGAAGCGACAGGAA | 63 | 4430 | 4445 | 627 |
| 826116 | 170 | 185 | GATGGAAGCGACAGGA | 53 | 4431 | 4446 | 628 |
| 826117 | 171 | 186 | GGATGGAAGCGACAGG | 78 | 4432 | 4447 | 629 |
| 826118 | 172 | 187 | GGGATGGAAGCGACAG | 38 | 4433 | 4448 | 630 |
| 826119 | 175 | 190 | CCAGGGATGGAAGCGA | 56 | 4436 | 4451 | 631 |
| 826131 | 216 | 231 | CAGGTGCAGCGGCCTG | 116 | 4477 | 4492 | 472 |
| 826134 | 226 | 241 | GTTCCCCTGACAGGTG | 84 | N/A | N/A | 634 |
| 826135 | 228 | 243 | TTGTTCCCCTGACAGG | 70 | N/A | N/A | 635 |
| 826136 | 229 | 244 | CTTGTTCCCCTGACAG | 60 | N/A | N/A | 636 |
| 826137 | 230 | 245 | GCTTGTTCCCCTGACA | 16 | N/A | N/A | 637 |
| 826138 | 232 | 247 | CAGCTTGTTCCCCTGA | 52 | N/A | N/A | 638 |
| 826139 | 233 | 248 | CCAGCTTGTTCCCCTG | 61 | N/A | N/A | 639 |
| 826151 | 283 | 298 | CCCCTCCATGAGACCT | 26 | 5211 | 5226 | 474 |
| 826154 | 292 | 307 | CAGCTTGTTCCCCTCC | 14 | 5220 | 5235 | 642 |
| 826155 | 310 | 325 | GCTAGAGTCCTGCTCC | 43 | 5238 | 5253 | 643 |
| 826156 | 312 | 327 | GGGCTAGAGTCCTGCT | 78 | 5240 | 5255 | 644 |
| 826157 | 315 | 330 | GGAGGGCTAGAGTCCT | 94 | 5243 | 5258 | 645 |
| 826158 | 320 | 335 | ACTGTGGAGGGCTAGA | 67 | 5248 | 5263 | 646 |
| 826159 | 321 | 336 | GACTGTGGAGGGCTAG | 92 | 5249 | 5264 | 647 |
| 826171 | 355 | 370 | CTCACGCTTGTTCCCC | 34 | 5283 | 5298 | 476 |
| 826174 | 360 | 375 | TGCTCCTCACGCTTGT | 13 | 5288 | 5303 | 650 |
| 826175 | 362 | 377 | CCTGCTCCTCACGCTT | 40 | 5290 | 5305 | 651 |
| 826176 | 363 | 378 | CCCTGCTCCTCACGCT | 20 | 5291 | 5306 | 652 |
| 826177 | 386 | 401 | GCGCCGCAGGTTCGGG | 49 | 5314 | 5329 | 653 |
| 826178 | 405 | 420 | TCCGCCGTGGGCTGCT | 44 | 5333 | 5348 | 654 |
| 826179 | 407 | 422 | CCTCCGCCGTGGGCTG | 36 | 5335 | 5350 | 655 |
| 826191 | 441 | 456 | CGGTAGGAGCGGTGGA | 55 | 5369 | 5384 | 478 |
| 826194 | 446 | 461 | GCTCTCGGTAGGAGCG | 60 | 5374 | 5389 | 658 |
| 826195 | 448 | 463 | GAGCTCTCGGTAGGAG | 61 | 5376 | 5391 | 959 |
| 826196 | 451 | 466 | GAAGAGCTCTCGGTAG | 48 | 5379 | 5394 | 660 |
| 826197 | 453 | 468 | TCGAAGAGCTCTCGGT | 36 | 5381 | 5396 | 661 |
| 826198 | 456 | 471 | AACTCGAAGAGCTCTC | 36 | 5384 | 5399 | 662 |
| 826199 | 457 | 472 | GAACTCGAAGAGCTCT | 49 | 5385 | 5400 | 663 |
| 826210 | 566 | 581 | TCATGCCAAAGGTGCA | 27 | 5494 | 5509 | 480 |
| 826213 | 575 | 590 | GCCAGTACATCATGCC | 9 | 5503 | 5518 | 666 |
| 826214 | 577 | 592 | TTGCCAGTACATCATG | 40 | 5505 | 5520 | 667 |
| 826215 | 580 | 595 | GAATTGCCAGTACATC | 36 | 5508 | 5523 | 668 |
| 826216 | 581 | 596 | CGAATTGCCAGTACAT | 26 | 5509 | 5524 | 669 |
| 826217 | 582 | 597 | CCGAATTGCCAGTACA | 24 | 5510 | 5525 | 670 |
| 826218 | 585 | 600 | AGGCCGAATTGCCAGT | 54 | 5513 | 5528 | 671 |
| 826230 | 607 | 622 | GCTGAAGTACTCTCCG | 47 | 5535 | 5550 | 482 |
| 826233 | 626 | 641 | TGTTGAGGCTGACGGG | 5 | 5554 | 5569 | 674 |
| 826234 | 628 | 643 | GATGTTGAGGCTGACG | 31 | 5556 | 5571 | 675 |
| 826235 | 639 | 654 | GAGTTGAGGTTGATGT | 34 | 5567 | 5582 | 676 |
| 826236 | 641 | 656 | CCGAGTTGAGGTTGAT | 22 | 5569 | 5584 | 677 |
| 826237 | 643 | 658 | GTCCGAGTTGAGGTTG | 30 | 5571 | 5586 | 678 |
| 826238 | 644 | 659 | TGTCCGAGTTGAGGTT | 35 | 5572 | 5587 | 679 |
| 826250 | 703 | 718 | AATTTCCGGGTACCTG | 29 | 16288 | 16303 | 484 |
| 826253 | 731 | 746 | TGCGGTCCAGCTCCTC | 17 | 16316 | 16331 | 682 |
| 826254 | 734 | 749 | TGATGCGGTCCAGCTC | 41 | 16319 | 16334 | 683 |
| 826255 | 737 | 752 | CTGTGATGCGGTCCAG | 49 | 16322 | 16337 | 684 |
| 826256 | 739 | 754 | CTCTGTGATGCGGTCC | 21 | 16324 | 16339 | 685 |
| 826257 | 740 | 755 | GCTCTGTGATGCGGTC | 26 | 16325 | 16340 | 686 |
| 826258 | 759 | 774 | TACAGGTCAAAGAGCG | 24 | 16344 | 16359 | 687 |
| 826268 | 792 | 807 | CCGGCCACGAGAGTGG | 93 | 16377 | 16392 | 486 |
| 826271 | 798 | 813 | CGGGAGCCGGCCACGA | 36 | 16383 | 16398 | 690 |
| 826272 | 800 | 815 | TGCGGGAGCCGGCCAC | 39 | 16385 | 16400 | 691 |
| 826273 | 803 | 818 | GGCTGCGGGAGCCGGC | 61 | 16388 | 16403 | 692 |
| 826274 | 804 | 819 | CGGCTGCGGGAGCCGG | 71 | 16389 | 16404 | 693 |
| 826275 | 805 | 820 | ACGGCTGCGGGAGCCG | 90 | 16390 | 16405 | 694 |
| 826276 | 807 | 822 | CGACGGCTGCGGGAGC | 68 | 16392 | 16407 | 695 |
| 826288 | 830 | 845 | GCGGCAGAGTCCCCCG | 62 | 16415 | 16430 | 488 |
| 826291 | 834 | 849 | GGGTGCGGCAGAGTCC | 22 | 16419 | 16434 | 698 |
| 826292 | 858 | 873 | GGCGGGACCCTCAGGC | 38 | 16443 | 16458 | 699 |
| 826293 | 877 | 892 | ACGGGCCCCGTGAGGC | 46 | 16462 | 16477 | 700 |
| 826294 | 879 | 894 | CGACGGGCCCCGTGAG | 54 | 16464 | 16479 | 701 |
| 826295 | 882 | 897 | GCTCGACGGGCCCCGT | 37 | 16467 | 16482 | 702 |
| 826296 | 883 | 898 | GGCTCGACGGGCCCCG | 46 | 16468 | 16483 | 703 |
| 826308 | 916 | 931 | GTTGTTGTCCCGCAAG | 24 | 16501 | 16516 | 490 |
| 826311 | 952 | 967 | GAAGCCGATCTTCCAG | 22 | 16537 | 16552 | 706 |
| 826312 | 953 | 968 | GGAAGCCGATCTTCCA | 72 | 16538 | 16553 | 707 |
| 826313 | 954 | 969 | TGGAAGCCGATCTTCC | 71 | 16539 | 16554 | 708 |
| 826314 | 956 | 971 | GCTGGAAGCCGATCTT | 37 | 16541 | 16556 | 709 |
| 826315 | 958 | 973 | CAGCTGGAAGCCGATC | 59 | 16543 | 16558 | 710 |
| 826316 | 968 | 983 | TCTGGTTGCACAGCTG | 30 | N/A | N/A | 711 |
| 826326 | 980 | 995 | AGTCCGATTTGTTCTG | 36 | 17766 | 17781 | 492 |
| 826329 | 983 | 998 | AGCAGTCCGATTTGTT | 29 | 17769 | 17784 | 714 |
| 826330 | 985 | 1000 | GAAGCAGTCCGATTTG | 51 | 17771 | 17786 | 715 |
| 826331 | 986 | 1001 | AGAAGCAGTCCGATTT | 33 | 17772 | 17787 | 716 |
| 826332 | 987 | 1002 | TAGAAGCAGTCCGATT | 61 | 17773 | 17788 | 717 |
| 826333 | 988 | 1003 | GTAGAAGCAGTCCGAT | 44 | 17774 | 17789 | 718 |
| 826334 | 989 | 1004 | GGTAGAAGCAGTCCGA | 18 | 17775 | 17790 | 719 |
| 826346 | 1018 | 1033 | CACCGCATCCACCCCT | 42 | 17804 | 17819 | 494 |
| 826349 | 1022 | 1037 | CCCTCACCGCATCCAC | 30 | 17808 | 17823 | 722 |
| 826350 | 1025 | 1040 | ACTCCCTCACCGCATC | 39 | 17811 | 17826 | 723 |
| 826351 | 1026 | 1041 | CACTCCCTCACCGCAT | 48 | 17812 | 17827 | 724 |
| 826352 | 1028 | 1043 | ACCACTCCCTCACCGC | 32 | 17814 | 17829 | 725 |
| 826353 | 1032 | 1047 | CGGTACCACTCCCTCA | 28 | 17818 | 17833 | 726 |
| 826354 | 1033 | 1048 | GCGGTACCACTCCCTC | 46 | 17819 | 17834 | 727 |
| 826366 | 1115 | 1130 | CGAAGATGAAGTTGCC | 67 | 17901 | 17916 | 496 |
| 826369 | 1123 | 1138 | GCGGCAGGCGAAGATG | 62 | 17909 | 17924 | 730 |
| 826370 | 1126 | 1141 | GAAGCGGCAGGCGAAG | 51 | 17912 | 17927 | 731 |
| 826371 | 1129 | 1144 | GTTGAAGCGGCAGGCG | 43 | 17915 | 17930 | 732 |
| 826372 | 1130 | 1145 | GGTTGAAGCGGCAGGC | 20 | 17916 | 17931 | 733 |
| 826373 | 1134 | 1149 | ACCTGGTTGAAGCGGC | 28 | 17920 | 17935 | 734 |
| 826374 | 1136 | 1151 | AGACCTGGTTGAAGCG | 31 | 17922 | 17937 | 735 |
| 826386 | 1164 | 1179 | AAGTGAGAGTAATTCG | 42 | N/A | N/A | 498 |
| 826389 | 1232 | 1247 | AAGACATCCAGAGGTT | 79 | 24188 | 24203 | 738 |
| 826390 | 1250 | 1265 | TGTTGATTCCAGGCAT | 27 | 24206 | 24221 | 739 |
| 826391 | 1251 | 1266 | TTGTTGATTCCAGGCA | 29 | 24207 | 24222 | 740 |
| 826392 | 1252 | 1267 | GTTGTTGATTCCAGGC | 16 | 24208 | 24223 | 741 |
| 826393 | 1254 | 1269 | CCGTTGTTGATTCCAG | 11 | 24210 | 24225 | 742 |
| 826394 | 1255 | 1270 | ACCGTTGTTGATTCCA | 9 | 24211 | 24226 | 743 |
| 826406 | 1282 | 1297 | CTGCTCTGCGCGCAGC | 56 | 24579 | 24594 | 500 |
| 826409 | 1285 | 1300 | ATTCTGCTCTGCGCGC | 16 | 24582 | 24597 | 746 |
| 826410 | 1286 | 1301 | CATTCTGCTCTGCGCG | 30 | 24583 | 24598 | 747 |
| 826411 | 1287 | 1302 | TCATTCTGCTCTGCGC | 20 | 24584 | 24599 | 748 |
| 826412 | 1323 | 1338 | CGGGCCCCAGTCACTG | 55 | 24620 | 24635 | 749 |
| 826413 | 1325 | 1340 | CCCGGGCCCCAGTCAC | 51 | 24622 | 24637 | 750 |
| 826414 | 1327 | 1342 | TACCCGGGCCCCAGTC | 38 | 24624 | 24639 | 751 |
| 826426 | 1356 | 1371 | AAGGCAGGTTCATCCT | 122 | 24653 | 24668 | 502 |
| 826429 | 1366 | 1381 | ATCATCCATAAAGGCA | 32 | 24663 | 24678 | 754 |
| 826430 | 1379 | 1394 | AGTTAAAGCCACCATC | 37 | 24676 | 24691 | 755 |
| 826431 | 1383 | 1398 | CGCAAGTTAAAGCCAC | 33 | 24680 | 24695 | 756 |
| 826432 | 1385 | 1400 | GCCGCAAGTTAAAGCC | 43 | 24682 | 24697 | 757 |
| 826433 | 1387 | 1402 | AGGCCGCAAGTTAAAG | 56 | 24684 | 24699 | 758 |
| 826434 | 1388 | 1403 | CAGGCCGCAAGTTAAA | 42 | 24685 | 24700 | 759 |
| 826446 | 1416 | 1431 | TTCCTCATGCTGATGG | 33 | 24713 | 24728 | 504 |
| 826449 | 1446 | 1461 | TAATCGCCCCCAAGTC | 22 | 25166 | 25181 | 762 |
| 826450 | 1447 | 1462 | ATAATCGCCCCCAAGT | 61 | 25167 | 25182 | 763 |
| 826451 | 1448 | 1463 | CATAATCGCCCCCAAG | 17 | 25168 | 25183 | 764 |
| 826452 | 1450 | 1465 | GCCATAATCGCCCCCA | 24 | 25170 | 25185 | 765 |
| 826453 | 1451 | 1466 | CGCCATAATCGCCCCC | 25 | 25171 | 25186 | 766 |
| 826454 | 1453 | 1468 | GTCGCCATAATCGCCC | 47 | 25173 | 25188 | 767 |
| 826466 | 1500 | 1515 | GAAGGGTAAAGGTTCT | 60 | 25220 | 25235 | 506 |
| 826469 | 1528 | 1543 | GTGAATACACACCTGC | 45 | N/A | N/A | 770 |
| 826470 | 1530 | 1545 | GAGTGAATACACACCT | 58 | 25444 | 25459 | 771 |
| 826471 | 1531 | 1546 | GGAGTGAATACACACC | 69 | 25445 | 25460 | 772 |
| 826472 | 1534 | 1549 | GCAGGAGTGAATACAC | 73 | 25448 | 25463 | 773 |
| 826473 | 1553 | 1568 | TGATCATGCTCTCCTG | 29 | 25467 | 25482 | 774 |
| 826474 | 1554 | 1569 | TTGATCATGCTCTCCT | 19 | 25468 | 25483 | 775 |
| 826485 | 1579 | 1594 | GAAGATGTAGGCACAG | 56 | 25493 | 25508 | 507 |
| 826488 | 1583 | 1598 | GATAGAAGATGTAGGC | 26 | 25497 | 25512 | 778 |
| 826489 | 1584 | 1599 | GGATAGAAGATGTAGG | 35 | 25498 | 25513 | 779 |
| 826490 | 1585 | 1600 | CGGATAGAAGATGTAG | 47 | 25499 | 25514 | 780 |
| 826491 | 1587 | 1602 | CGCGGATAGAAGATGT | 47 | 25501 | 25516 | 781 |
| 826492 | 1588 | 1603 | CCGCGGATAGAAGATG | 71 | 25502 | 25517 | 782 |
| 826493 | 1589 | 1604 | GCCGCGGATAGAAGAT | 62 | 25503 | 25518 | 783 |
| 826505 | 1661 | 1676 | CAACCTGGAGCTTATA | 54 | 30607 | 30622 | 509 |
| 826508 | 1669 | 1684 | GGAGAAGTCAACCTGG | 10 | 30615 | 30630 | 786 |
| 826509 | 1675 | 1690 | GTCTGAGGAGAAGTCA | 32 | 30621 | 30636 | 787 |
| 826510 | 1696 | 1711 | CTTGGTGAAACAGCCC | 53 | 30642 | 30657 | 788 |
| 826511 | 1702 | 1717 | CCGGCACTTGGTGAAA | 92 | 30648 | 30663 | 789 |
| 826512 | 1708 | 1723 | TGGCTTCCGGCACTTG | 25 | 30654 | 30669 | 790 |
| 826513 | 1709 | 1724 | ATGGCTTCCGGCACTT | 34 | 30655 | 30670 | 791 |
| 826525 | 1736 | 1751 | CAGAGAGCTGGTAGCT | 72 | 30787 | 30802 | 511 |
| 826565 | 1993 | 2008 | GACGAGCTCAGCCATC | 39 | 31822 | 31837 | 513 |
| 826568 | 2001 | 2016 | AGGTCAAAGACGAGCT | 29 | 31830 | 31845 | 795 |
| 826569 | 2002 | 2017 | CAGGTCAAAGACGAGC | 28 | 31831 | 31846 | 796 |
| 826570 | 2003 | 2018 | GCAGGTCAAAGACGAG | 42 | 31832 | 31847 | 797 |
| 826571 | 2009 | 2024 | TGACCAGCAGGTCAAA | 106 | 31838 | 31853 | 798 |
| 826572 | 2011 | 2026 | GATGACCAGCAGGTCA | 71 | 31840 | 31855 | 799 |
| 826573 | 2032 | 2047 | TCGGAGCAGCATGAGG | 37 | 31861 | 31876 | 800 |
| 826584 | 2046 | 2061 | CGGCTTCGGAACCTTC | 41 | 31875 | 31890 | 514 |
| 826587 | 2049 | 2064 | TATCGGCTTCGGAACC | 43 | 31878 | 31893 | 803 |
| 826588 | 2050 | 2065 | GTATCGGCTTCGGAAC | 30 | 31879 | 31894 | 804 |
| 826589 | 2051 | 2066 | AGTATCGGCTTCGGAA | 27 | 31880 | 31895 | 805 |
| 826590 | 2053 | 2068 | CCAGTATCGGCTTCGG | 23 | 31882 | 31897 | 806 |
| 826591 | 2054 | 2069 | ACCAGTATCGGCTTCG | 12 | 31883 | 31898 | 807 |
| 826592 | 2055 | 2070 | GACCAGTATCGGCTTC | 36 | 31884 | 31899 | 808 |
| 826604 | 2217 | 2232 | CCCAGGGTGGCATAGG | 46 | 32046 | 32061 | 516 |
| 826607 | 2282 | 2297 | AGGGCCCCCCCAGAGG | 97 | 32111 | 32126 | 811 |
| 826608 | 2284 | 2299 | TCAGGGCCCCCCCAGA | 70 | 32113 | 32128 | 812 |
| 826609 | 2308 | 2323 | GTGTGAGAAACCTCTC | 34 | 32137 | 32152 | 813 |
| 826610 | 2310 | 2325 | TGGTGTGAGAAACCTC | 58 | 32139 | 32154 | 814 |
| 826611 | 2313 | 2328 | CCTTGGTGTGAGAAAC | 46 | 32142 | 32157 | 815 |
| 826612 | 2314 | 2329 | GCCTTGGTGTGAGAAA | 37 | 32143 | 32158 | 816 |
| 826624 | 2390 | 2405 | TGGGCGGCTCTGAGAG | 52 | 32219 | 32234 | 518 |
| 826627 | 2399 | 2414 | ACGGCAGTTTGGGCGG | 30 | 32228 | 32243 | 819 |
| 826628 | 2400 | 2415 | AACGGCAGTTTGGGCG | 37 | 32229 | 32244 | 820 |
| 826629 | 2401 | 2416 | CAACGGCAGTTTGGGC | 36 | 32230 | 32245 | 821 |
| 826630 | 2403 | 2418 | ATCAACGGCAGTTTGG | 35 | 32232 | 32247 | 822 |
| 826631 | 2405 | 2420 | ACATCAACGGCAGTTT | 16 | 32234 | 32249 | 823 |
| 826632 | 2407 | 2422 | ACACATCAACGGCAGT | 15 | 32236 | 32251 | 824 |
| 826644 | 2476 | 2491 | CTGGGCAGCTTCATCA | 42 | 32305 | 32320 | 520 |
| 826647 | 2491 | 2506 | GGAGCCAAGGCACTTC | 13 | 32320 | 32335 | 827 |
| 826648 | 2492 | 2507 | TGGAGCCAAGGCACTT | 29 | 32321 | 32336 | 828 |
| 826649 | 2502 | 2517 | GGTACAGGGCTGGAGC | 52 | 32331 | 32346 | 829 |
| 826650 | 2520 | 2535 | TCAGAGGCAGTACCAA | 30 | 32349 | 32364 | 830 |
| 826651 | 2523 | 2538 | TGTTCAGAGGCAGTAC | 33 | 32352 | 32367 | 831 |
| 826652 | 2533 | 2548 | GAAACCAGAGTGTTCA | 48 | 32362 | 32377 | 832 |
| 826665 | 2579 | 2594 | CTTGGCTGATCCAAGG | 61 | 32408 | 32423 | 835 |
| 826666 | 2580 | 2595 | GCTTGGCTGATCCAAG | 45 | 32409 | 32424 | 836 |
| 826667 | 2581 | 2596 | CGCTTGGCTGATCCAA | 27 | 32410 | 32425 | 837 |
| 826668 | 2582 | 2597 | TCGCTTGGCTGATCCA | 6 | 32411 | 32426 | 838 |
| 826669 | 2583 | 2598 | TTCGCTTGGCTGATCC | 34 | 32412 | 32427 | 839 |
| 826670 | 2584 | 2599 | TTTCGCTTGGCTGATC | 30 | 32413 | 32428 | 840 |
| 826682 | 2612 | 2627 | TAGGAAAGTTCCTTGT | 83 | 32441 | 32456 | 523 |
| 826685 | 2623 | 2638 | CAGCGGTTTCTTAGGA | 16 | 32452 | 32467 | 843 |
| 826686 | 2625 | 2640 | ATCAGCGGTTTCTTAG | 42 | 32454 | 32469 | 844 |
| 826687 | 2627 | 2642 | TTATCAGCGGTTTCTT | 22 | 32456 | 32471 | 845 |
| 826688 | 2629 | 2644 | GGTTATCAGCGGTTTC | 9 | 32458 | 32473 | 846 |
| 826689 | 2632 | 2647 | CCTGGTTATCAGCGGT | 17 | 32461 | 32476 | 847 |
| 826690 | 2634 | 2649 | GTCCTGGTTATCAGCG | 25 | 32463 | 32478 | 848 |
| 826702 | 2681 | 2696 | TGGGCAGGAAACCCGT | 58 | 32510 | 32525 | 525 |
| 826705 | 2692 | 2707 | TAAGCCGTCGCTGGGC | 34 | 32521 | 32536 | 851 |
| 826706 | 2693 | 2708 | TTAAGCCGTCGCTGGG | 47 | 32522 | 32537 | 852 |
| 826707 | 2696 | 2711 | GGCTTAAGCCGTCGCT | 24 | 32525 | 32540 | 853 |
| 826708 | 2698 | 2713 | CTGGCTTAAGCCGTCG | 42 | 32527 | 32542 | 854 |
| 826709 | 2700 | 2715 | GGCTGGCTTAAGCCGT | 90 | 32529 | 32544 | 855 |
| 826710 | 2701 | 2716 | GGGCTGGCTTAAGCCG | 83 | 32530 | 32545 | 856 |
| 826722 | 2835 | 2850 | CCTAGCCCTCGGGAGT | 71 | 32664 | 32679 | 527 |
| 826725 | 2846 | 2861 | TCTGCTCTAGCCCTAG | 52 | 32675 | 32690 | 859 |
| 826726 | 2847 | 2862 | GTCTGCTCTAGCCCTA | 35 | 32676 | 32691 | 860 |
| 826727 | 2850 | 2865 | CGGGTCTGCTCTAGCC | 61 | 32679 | 32694 | 861 |
| 826728 | 2852 | 2867 | CCCGGGTCTGCTCTAG | 84 | 32681 | 32696 | 862 |
| 826729 | 2854 | 2869 | TACCCGGGTCTGCTCT | 63 | 32683 | 32698 | 863 |
| 826730 | 2855 | 2870 | TTACCCGGGTCTGCTC | 54 | 32684 | 32699 | 864 |
| 826742 | 2949 | 2964 | TGTAGAGGTATGAAAG | 55 | 32778 | 32793 | 529 |
| 826745 | 2954 | 2969 | AGACATGTAGAGGTAT | 17 | 32783 | 32798 | 867 |
| 826746 | 2955 | 2970 | CAGACATGTAGAGGTA | 7 | 32784 | 32799 | 868 |
| 826747 | 2959 | 2974 | CAAGCAGACATGTAGA | 31 | 32788 | 32803 | 869 |
| 826748 | 2960 | 2975 | TCAAGCAGACATGTAG | 30 | 32789 | 32804 | 870 |
| 826749 | 2961 | 2976 | CTCAAGCAGACATGTA | 24 | 32790 | 32805 | 871 |
| 826750 | 2963 | 2978 | ATCTCAAGCAGACATG | 39 | 32792 | 32807 | 872 |
| 826764 | 3016 | 3031 | ATGCATAGGAGTTCTC | 8 | 32845 | 32860 | 875 |
| 826765 | 3017 | 3032 | GATGCATAGGAGTTCT | 30 | 32846 | 32861 | 876 |
| 826766 | 3019 | 3034 | GGGATGCATAGGAGTT | 32 | 32848 | 32863 | 877 |
| 826767 | 3021 | 3036 | AAGGGATGCATAGGAG | 31 | 32850 | 32865 | 878 |
| 826768 | 3022 | 3037 | TAAGGGATGCATAGGA | 25 | 32851 | 32866 | 879 |
| 826769 | 3023 | 3038 | CTAAGGGATGCATAGG | 35 | 32852 | 32867 | 880 |
| 826781 | 3117 | 3132 | CTACGGGAGCCCAGGA | 32 | 32946 | 32961 | 532 |
| 826784 | 3121 | 3136 | TGTGCTACGGGAGCCC | 8 | 32950 | 32965 | 883 |
| 826785 | 3122 | 3137 | GTGTGCTACGGGAGCC | 20 | 32951 | 32966 | 884 |
| 826786 | 3123 | 3138 | AGTGTGCTACGGGAGC | 15 | 32952 | 32967 | 885 |
| 826787 | 3124 | 3139 | TAGTGTGCTACGGGAG | 21 | 32953 | 32968 | 886 |
| 826788 | 3125 | 3140 | ATAGTGTGCTACGGGA | 29 | 32954 | 32969 | 887 |
| 826789 | 3126 | 3141 | TATAGTGTGCTACGGG | 30 | 32955 | 32970 | 888 |
| 826800 | 3145 | 3160 | GCAACACTCCAGCAGA | 17 | 32974 | 32989 | 534 |
| 826803 | 3153 | 3168 | GTGCAACAGCAACACT | 36 | 32982 | 32997 | 890 |
| 826804 | 3154 | 3169 | GGTGCAACAGCAACAC | 33 | 32983 | 32998 | 891 |
| 826805 | 3155 | 3170 | TGGTGCAACAGCAACA | 30 | 32984 | 32999 | 892 |
| 826806 | 3156 | 3171 | ATGGTGCAACAGCAAC | 11 | 32985 | 33000 | 893 |
| 826807 | 3157 | 3172 | TATGGTGCAACAGCAA | 21 | 32986 | 33001 | 894 |
| 826808 | 3158 | 3173 | GTATGGTGCAACAGCA | 20 | 32987 | 33002 | 895 |
| 826818 | 3213 | 3228 | TGACCGCAAGGCACTT | 30 | 33042 | 33057 | 536 |
| 826821 | 3216 | 3231 | CCCTGACCGCAAGGCA | 7 | 33045 | 33060 | 897 |
| 826822 | 3217 | 3232 | TCCCTGACCGCAAGGC | 28 | 33046 | 33061 | 898 |
| 826823 | 3218 | 3233 | GTCCCTGACCGCAAGG | 25 | 33047 | 33062 | 899 |
| 826824 | 3219 | 3234 | AGTCCCTGACCGCAAG | 33 | 33048 | 33063 | 900 |
| 826825 | 3220 | 3235 | CAGTCCCTGACCGCAA | 17 | 33049 | 33064 | 901 |
| 826826 | 3222 | 3237 | TTCAGTCCCTGACCGC | 19 | 33051 | 33066 | 902 |
| 826837 | 3236 | 3251 | ATAAACGGGCAAGATT | 57 | 33065 | 33080 | 538 |
| 826840 | 3239 | 3254 | TACATAAACGGGCAAG | 40 | 33068 | 33083 | 905 |
| 826841 | 3242 | 3257 | GCATACATAAACGGGC | 35 | 33071 | 33086 | 906 |
| 826842 | 3244 | 3259 | GAGCATACATAAACGG | 27 | 33073 | 33088 | 907 |
| 826843 | 3249 | 3264 | ACATGGAGCATACATA | 69 | 33078 | 33093 | 908 |
| 826844 | 3250 | 3265 | GACATGGAGCATACAT | 42 | 33079 | 33094 | 909 |
| 826845 | 3251 | 3266 | AGACATGGAGCATACA | 48 | 33080 | 33095 | 910 |
| 826857 | N/A | N/A | TCCCCTTGGAAGGGAC | 109 | 2713 | 2728 | 540 |
| 826860 | N/A | N/A | TGATACCTCCCCTTGG | 90 | 2720 | 2735 | 913 |
| 826861 | N/A | N/A | ATGATACCTCCCCTTG | 84 | 2721 | 2736 | 914 |
| 826862 | N/A | N/A | GCTCATGATACCTCCC | 68 | 2725 | 2740 | 915 |
| 826863 | N/A | N/A | ACTGCTCATGATACCT | 89 | 2728 | 2743 | 916 |
| 826864 | N/A | N/A | ATACTGCTCATGATAC | 70 | 2730 | 2745 | 917 |
| 826865 | N/A | N/A | GATACTGCTCATGATA | 87 | 2731 | 2746 | 918 |
| 826877 | N/A | N/A | GTCCTAGCACCTCCCT | 15 | 4868 | 4883 | 542 |
| 826880 | N/A | N/A | CGAGTTTTGTCCTAGC | 7 | 4876 | 4891 | 921 |
| 826881 | N/A | N/A | TCGAGTTTTGTCCTAG | 25 | 4877 | 4892 | 922 |
| 826882 | N/A | N/A | CTTTCGAGTTTTGTCC | 36 | 4880 | 4895 | 923 |
| 826883 | N/A | N/A | CACCTTTCGAGTTTTG | 26 | 4883 | 4898 | 924 |
| 826884 | N/A | N/A | GCCACCTTTCGAGTTT | 30 | 4885 | 4900 | 925 |
| 826885 | N/A | N/A | GGGCCACCTTTCGAGT | 27 | 4887 | 4902 | 926 |
| 826897 | N/A | N/A | CTTCCCTAGAACGGCC | 37 | 4923 | 4938 | 544 |
| 826900 | N/A | N/A | GCCGGAGCTGGGCTTC | 36 | 4935 | 4950 | 929 |
| 826901 | N/A | N/A | TGCCGGAGCTGGGCTT | 80 | 4936 | 4951 | 930 |
| 826902 | N/A | N/A | GTGCCGGAGCTGGGCT | 67 | 4937 | 4952 | 931 |
| 826903 | N/A | N/A | AAGTGCCGGAGCTGGG | 30 | 4939 | 4954 | 932 |
| 826904 | N/A | N/A | AAAAGTGCCGGAGCTG | 45 | 4941 | 4956 | 933 |
| 826905 | N/A | N/A | CCAAAAGTGCCGGAGC | 28 | 4943 | 4958 | 934 |
| 826917 | N/A | N/A | GAACCCGAGTGAGGCT | 39 | 5059 | 5074 | 546 |
| 826920 | N/A | N/A | CCCCTGGAACCCGAGT | 25 | 5065 | 5080 | 937 |
| 826921 | N/A | N/A | CACCCCTGGAACCCGA | 50 | 5067 | 5082 | 938 |
| 826922 | N/A | N/A | CCCGGAGTGGATTGGG | 100 | 5138 | 5153 | 939 |
| 826923 | N/A | N/A | GCCCCGGAGTGGATTG | 50 | 5140 | 5155 | 940 |
| 826924 | N/A | N/A | GAGCCCCGGAGTGGAT | 46 | 5142 | 5157 | 941 |
| 826925 | N/A | N/A | ATGAGCCCCGGAGTGG | 38 | 5144 | 5159 | 942 |
| 826937 | N/A | N/A | AGCCGGGAAGGCCTCC | 124 | 2486 | 2501 | 548 |
| 826940 | N/A | N/A | TGCTTACCTTGATACT | 113 | 2741 | 2756 | 945 |
| 826941 | N/A | N/A | CCAAACCAGGTTCCCT | 125 | 2757 | 2772 | 946 |
| 826942 | N/A | N/A | AGCCGGTGTCAACCAG | 103 | 2777 | 2792 | 947 |
| 826943 | N/A | N/A | AAAGTGAAAGCCGGTG | 112 | 2785 | 2800 | 948 |
| 826944 | N/A | N/A | TGCGACTTCTTAAAGT | 84 | 2796 | 2811 | 949 |
| 826945 | N/A | N/A | GCTCAGGGTCCAACCT | 109 | 2844 | 2859 | 950 |
| 826957 | N/A | N/A | GCCAAGTGGTGAGCAA | 42 | 3338 | 3353 | 550 |
| 826960 | N/A | N/A | CGTTGATGGGCTATAT | 99 | 3408 | 3423 | 953 |
| 826961 | N/A | N/A | CGCCTAGACAGGCCCT | 44 | 3440 | 3455 | 954 |
| 826962 | N/A | N/A | ACGCAGGACACTGTGG | 80 | 3555 | 3570 | 955 |
| 826963 | N/A | N/A | AGGCAGCGCGAGGGCC | 101 | 3571 | 3586 | 956 |
| 826964 | N/A | N/A | GTGTAATCGCCCCTGC | 90 | 3622 | 3637 | 957 |
| 826965 | N/A | N/A | GGCCCTAGGACATTCT | 79 | 3674 | 3689 | 958 |
| 826977 | N/A | N/A | TGGGACTGGTTCCTTT | 94 | 4536 | 4551 | 552 |
| 826980 | N/A | N/A | GGGACTAACCGACCTG | 98 | 5631 | 5646 | 961 |
| 826981 | N/A | N/A | TTCCAGGCGCAGGCAC | 39 | 5662 | 5677 | 862 |
| 826982 | N/A | N/A | CAGTAAGCTGGAGGCT | 92 | 5785 | 5800 | 963 |
| 826983 | N/A | N/A | CGCCAGTCCAGTAAGC | 85 | 5793 | 5808 | 964 |
| 826984 | N/A | N/A | GCTAGGATGGCTCCAC | 27 | 5819 | 5834 | 965 |
| 826985 | N/A | N/A | CCACACTCTGGGTGAG | 36 | 5843 | 5858 | 966 |
| 826997 | N/A | N/A | CCAGACCCAACATTGG | 84 | 6361 | 6376 | 554 |
| 827000 | N/A | N/A | TCCCAAGGTGTGGCAT | 15 | 6462 | 6477 | 969 |
| 827001 | N/A | N/A | TTGAAGCAGGTGTTCC | 57 | 6475 | 6490 | 970 |
| 827002 | N/A | N/A | TGCCAGGTGCCTAGCC | 44 | 6502 | 6517 | 971 |
| 827003 | N/A | N/A | CAATAAAGGGCTTATG | 64 | 6538 | 6553 | 972 |
| 827004 | N/A | N/A | AACTACCTGGCCTTCA | 69 | 6552 | 6567 | 973 |
| 827005 | N/A | N/A | GGCTTATATGCCTGTC | 68 | 6605 | 6620 | 974 |
| 827017 | N/A | N/A | CTTTCTTAGTCCGTAA | 48 | 6815 | 6830 | 556 |
| 827020 | N/A | N/A | AGGAAATGGTCCCTAC | 70 | 6912 | 6927 | 977 |
| 827021 | N/A | N/A | GTGCACACGGCAGCTT | 52 | 6932 | 6947 | 978 |
| 827022 | N/A | N/A | CCCAAGACACCTTCGC | 33 | 6955 | 6970 | 979 |
| 827023 | N/A | N/A | TAGCACCGGGCTTGTA | 51 | 6994 | 7009 | 980 |
| 827024 | N/A | N/A | AACAGGATGAGTCACA | 31 | 7088 | 7103 | 981 |
| 827025 | N/A | N/A | AGTTTTGGGATTAGGC | 30 | 7107 | 7122 | 982 |
| 827040 | N/A | N/A | GGGAATAATACTGCCC | 91 | 7751 | 7766 | 985 |
| 827041 | N/A | N/A | AATGTATGTTCCCTTG | 27 | 7816 | 7831 | 986 |
| 827042 | N/A | N/A | GTAAAAAGTCTGGCCC | 16 | 8222 | 8237 | 987 |
| 827043 | N/A | N/A | TCCAAGGTGTGTTGTG | 22 | 8283 | 8298 | 988 |
| 827044 | N/A | N/A | CATGAGACCTACTTCC | 26 | 8296 | 8311 | 989 |
| 827045 | N/A | N/A | ATAAGAGTCATCATGA | 46 | 8307 | 8322 | 990 |
| 827057 | N/A | N/A | TCGGTAGGAGTCATTC | 39 | 8767 | 8782 | 559 |
| 827060 | N/A | N/A | CCTCAGCAGGTAGGCA | 60 | 8836 | 8851 | 993 |
| 827061 | N/A | N/A | TCGGACTCAGCACTTC | 64 | 8961 | 8976 | 994 |
| 827062 | N/A | N/A | CTGCAGTGGCCAACCC | 51 | 8983 | 8998 | 995 |
| 827063 | N/A | N/A | CTGTAGGTATGACTGG | 18 | 9047 | 9062 | 996 |
| 827064 | N/A | N/A | TTCCATGACTGTAGGT | 32 | 9055 | 9070 | 997 |
| 827065 | N/A | N/A | GCCTAAACCGTTCCTG | 36 | 9105 | 9120 | 998 |
| 827077 | N/A | N/A | TCTTACCCCGGTGGCC | 69 | 9507 | 9522 | 561 |
| 827080 | N/A | N/A | GGCCTATCAACTAGGC | 103 | 9783 | 9798 | 1001 |
| 827081 | N/A | N/A | CACAATTCCATCGGGC | 17 | 9837 | 9852 | 1002 |
| 827082 | N/A | N/A | CCCTACATTGGAGGGT | 91 | 9866 | 9881 | 1003 |
| 827083 | N/A | N/A | AGGGATAAAGAATGCC | 38 | 9978 | 9993 | 1004 |
| 827084 | N/A | N/A | GACCAGCGGCTGGAGG | 54 | 9996 | 10011 | 1005 |
| 827085 | N/A | N/A | AGACATCCGATCTTGT | 41 | 10020 | 10035 | 1006 |
| 827097 | N/A | N/A | CTGCCACCCTACGCGC | 54 | 10635 | 10650 | 563 |
| 827100 | N/A | N/A | TACGCACCTCCCTCCT | 35 | 10649 | 10664 | 1009 |
| | | | | | 10672 | 10687 | |
| 827101 | N/A | N/A | CTACGCACCTCCCTCC | 64 | 10650 | 10665 | 1010 |
| | | | | | 10673 | 10688 | |
| 827102 | N/A | N/A | CCCTACGCACCTCCCT | 60 | 10652 | 10667 | 1011 |
| | | | | | 10675 | 10690 | |
| 827103 | N/A | N/A | ACCCTACGCACCTCCC | 34 | 10653 | 10668 | 1012 |
| | | | | | 10676 | 10691 | |
| 827104 | N/A | N/A | CCACCCTACGCACCTC | 36 | 10655 | 10670 | 1013 |
| | | | | | 10678 | 10693 | |
| 827105 | N/A | N/A | GCCACCCTACGCACCT | 49 | 10656 | 10671 | 1014 |
| | | | | | 10679 | 10694 | |
| 827117 | N/A | N/A | GGGCATAACACTAGAT | 53 | 11100 | 11115 | 565 |
| 827120 | N/A | N/A | CCACATGGTGCCCCAG | 40 | 11248 | 11263 | 1017 |
| 827121 | N/A | N/A | TTTTAGGAGGGCCACA | 60 | 11259 | 11274 | 1018 |
| 827122 | N/A | N/A | GCCCTCTGGTCCGTCC | 40 | 11291 | 11306 | 1019 |
| 827123 | N/A | N/A | GGTCAGACAGCACTCC | 36 | 11319 | 11334 | 1020 |
| 827124 | N/A | N/A | AGCTAGCAAATGGGTC | 56 | 11331 | 11346 | 1021 |
| 827125 | N/A | N/A | TTCCAGTTGGCACAGC | 26 | 11344 | 11359 | 1022 |
| 827137 | N/A | N/A | GGTTACACCCCCGGCG | 44 | 11650 | 11665 | 567 |
| 827140 | N/A | N/A | CCCACAGAAAACGGAA | 74 | 11690 | 11705 | 1025 |
| 827141 | N/A | N/A | GGCTGCTGCATGATTC | 33 | 11738 | 11753 | 1026 |
| 827142 | N/A | N/A | ACCAGAATAGATTCAC | 63 | 11766 | 11781 | 1027 |
| 827143 | N/A | N/A | TCGAATCGAGTGCCCC | 40 | 11791 | 11806 | 1028 |
| 827144 | N/A | N/A | AACAATGAACCTCGAA | 51 | 11802 | 11817 | 1029 |
| 827145 | N/A | N/A | TGGTATTAGAATGTAC | 19 | 11881 | 11896 | 1030 |
| 827157 | N/A | N/A | TTGAAAGAGCCCCCAC | 65 | 12166 | 12181 | 569 |
| 827160 | N/A | N/A | GTGCAGGGTCTTACTT | 19 | 12230 | 12245 | 1033 |
| 827161 | N/A | N/A | AAATACCAGTGCAGGG | 41 | 12238 | 12253 | 1034 |
| 827162 | N/A | N/A | GTACATCAATTATGCC | 36 | 12268 | 12283 | 1035 |
| 827163 | N/A | N/A | GGGCACTCAAGATTTG | 62 | 12295 | 12310 | 1036 |
| 827164 | N/A | N/A | CAAACCTGAGTGGGCA | 36 | 12306 | 12321 | 1037 |
| 827165 | N/A | N/A | CTCGACTGTCAAACCT | 30 | 12315 | 12330 | 1038 |
| 827177 | N/A | N/A | GCAATCATAGCTAGCA | 57 | 12729 | 12744 | 571 |
| 827180 | N/A | N/A | GTTGAAGGTGTGTGTT | 35 | 13095 | 13110 | 1041 |
| 827181 | N/A | N/A | AGCAACTCAAAGGTGT | 22 | 13111 | 13126 | 1042 |
| 827182 | N/A | N/A | AGATTTGTACATGAGG | 30 | 13481 | 13496 | 1043 |
| 827183 | N/A | N/A | ACCCGAAACACATTAG | 61 | 13504 | 13519 | 1044 |
| 827184 | N/A | N/A | GTTTAGGCCGCACCCG | 36 | 13515 | 13530 | 1045 |
| 827185 | N/A | N/A | ATTTACGGTGTTTAGG | 42 | 13524 | 13539 | 1046 |
| 827197 | N/A | N/A | GTAGGCACTTTATGAA | 68 | 14142 | 14157 | 573 |
| 827200 | N/A | N/A | AACCGTATGTAGTAGG | 18 | 14153 | 14168 | 1049 |
| 827201 | N/A | N/A | CAACCGTATGTAGTAG | 25 | 14154 | 14169 | 1050 |
| 827202 | N/A | N/A | ACAACCGTATGTAGTA | 40 | 14155 | 14170 | 1051 |
| 827203 | N/A | N/A | AACAACCGTATGTAGT | 36 | 14156 | 14171 | 1052 |
| 827204 | N/A | N/A | GAACAACCGTATGTAG | 39 | 14157 | 14172 | 1053 |
| 827216 | N/A | N/A | GGAGAGACAATAGATC | 50 | 14488 | 14503 | 575 |
| 827219 | N/A | N/A | TGACATACTGCTTCTA | 33 | 14642 | 14657 | 1056 |
| 827220 | N/A | N/A | CCCCAGCAGGTATTTT | 98 | 14667 | 14682 | 1057 |
| 827221 | N/A | N/A | CCCAAGCAATCACCAG | 61 | 14737 | 14752 | 1058 |
| 827222 | N/A | N/A | GACCAAAAGTGTGCCA | 54 | 14831 | 14846 | 1059 |
| 827223 | N/A | N/A | GACACAATCGCCGCTC | 64 | 14905 | 14920 | 1060 |
| 827224 | N/A | N/A | GAATAAGTGGAGATAT | 84 | 15017 | 15032 | 1061 |
| 827236 | N/A | N/A | CCGCAGGCGAGTGTCG | 61 | 15878 | 15893 | 577 |
| 827239 | N/A | N/A | CCGGACCTAGAAGGGA | 89 | 15987 | 16002 | 1064 |
| 827240 | N/A | N/A | GGCCACGGCGAGCCCA | 82 | 16080 | 16095 | 1065 |
| 827241 | N/A | N/A | GTAAACAGGTGTGTCC | 48 | 16110 | 16125 | 1066 |
| 827242 | N/A | N/A | CTGGAGCGAGTGTCTG | 93 | 16238 | 16253 | 1067 |
| 827243 | N/A | N/A | GCGGAGCCCATGGGTG | 52 | 16616 | 16631 | 1068 |
| 827244 | N/A | N/A | TGTCACTGGGCTGCGC | 41 | 16650 | 16665 | 1069 |
| 827256 | N/A | N/A | CAAGAGATTTGTCCCA | 67 | 17420 | 17435 | 579 |
| 827259 | N/A | N/A | ATTTATACCTCCCCTG | 60 | 17495 | 17510 | 1072 |
| 827260 | N/A | N/A | CACACACGGTTTTGGT | 26 | 17513 | 17528 | 1073 |
| 827261 | N/A | N/A | GACCAGTAGCTGCACA | 34 | 17527 | 17542 | 1074 |
| 827262 | N/A | N/A | ATTAAGGGAGTTGCAG | 61 | 17555 | 17570 | 1075 |
| 827263 | N/A | N/A | CCCTAGGAGCATGGAC | 47 | 17585 | 17600 | 1076 |
| 827264 | N/A | N/A | GCAGAAGTCCCTAGGA | 61 | 17593 | 17608 | 1077 |
| 827276 | N/A | N/A | CCTCAGATCCAGCAGT | 49 | 18147 | 18162 | 581 |
| 827279 | N/A | N/A | AGATCCATGCTTCCAG | 11 | 18216 | 18231 | 1080 |
| 827280 | N/A | N/A | AAGATCCATGCTTCCA | 17 | 18217 | 18232 | 1081 |
| 827281 | N/A | N/A | CCAAGATCCATGCTTC | 20 | 18219 | 18234 | 1082 |
| 827282 | N/A | N/A | ACCAAGATCCATGCTT | 35 | 18220 | 18235 | 1083 |
| 827283 | N/A | N/A | GACCAAGATCCATGCT | 13 | 18221 | 18236 | 1084 |
| 827295 | N/A | N/A | GATACATCCAGAGTCA | 36 | 18725 | 18740 | 583 |
| 827298 | N/A | N/A | AGGATGATGTGATACA | 24 | 18735 | 18750 | 1087 |
| 827299 | N/A | N/A | AAGGATGATGTGATAC | 36 | 18736 | 18751 | 1088 |
| 827300 | N/A | N/A | ATCTAAGAAATAGGCT | 29 | 18755 | 18770 | 1089 |
| 827301 | N/A | N/A | CACATAGCCCAGATAG | 21 | 18834 | 18849 | 1090 |
| 827302 | N/A | N/A | TGCCAAAGGAGCATGG | 52 | 18901 | 18916 | 1091 |
| 827314 | N/A | N/A | GGAGATGGCTCCGGAA | 63 | 19278 | 19293 | 585 |
| 827317 | N/A | N/A | GGTAAGAAGTGACACC | 62 | 19364 | 19379 | 1094 |
| 827318 | N/A | N/A | GTGTACTGGGCAGAGT | 16 | 19390 | 19405 | 1095 |
| 827319 | N/A | N/A | TGCTACCATCTTACTT | 26 | 19463 | 19478 | 1096 |
| 827320 | N/A | N/A | GGCTTAGGTGTTGCTA | 28 | 19474 | 19489 | 1097 |
| 827321 | N/A | N/A | GCGGACTCAGGCTTAG | 50 | 19483 | 19498 | 1098 |
| 827322 | N/A | N/A | TGACAGGTGTGGGCGG | 46 | 19495 | 19510 | 1099 |
| 827334 | N/A | N/A | AACCATGGACTTTCTG | 46 | 19687 | 19702 | 587 |
| 827337 | N/A | N/A | CCCAGGCGAGCAATGA | 49 | 19746 | 19761 | 1102 |
| 827338 | N/A | N/A | GGTATAACAACCCAGG | 34 | 19756 | 19771 | 1103 |
| 827339 | N/A | N/A | CAGTAGGGTGGAGTGG | 41 | 19774 | 19789 | 1104 |
| 827340 | N/A | N/A | GTACAAAGGTTCCTGT | 48 | 19829 | 19844 | 1105 |
| 827341 | N/A | N/A | CGTGAAGTAAGGTTGA | 25 | 19846 | 19861 | 1106 |
| 827342 | N/A | N/A | GTTACATGTGGTGACG | 43 | 19860 | 19875 | 1107 |
| 827353 | N/A | N/A | ACTAACTGGAATAGTT | 99 | 19873 | 19888 | 589 |
| 827356 | N/A | N/A | AGGACTAACTGGAATA | 15 | 19876 | 19891 | 1110 |
| 827357 | N/A | N/A | CAGGACTAACTGGAAT | 31 | 19877 | 19892 | 1111 |
| 827358 | N/A | N/A | GCCCGGTGAGATATTC | 55 | 19923 | 19938 | 1112 |
| 827359 | N/A | N/A | CCCGATAGCTGGTTGT | 11 | 20415 | 20430 | 1113 |
| 827360 | N/A | N/A | TTAATTAGTTCACCCG | 4 | 20427 | 20442 | 1114 |
| 827361 | N/A | N/A | AGTGAATCCTCACACT | 88 | 20444 | 20459 | 1115 |
| 827373 | N/A | N/A | AAAAAGGTGGTGTATC | 80 | 21111 | 21126 | 591 |
| 827376 | N/A | N/A | TCATAGGTAAACACCC | 14 | 21565 | 21580 | 1118 |
| 827377 | N/A | N/A | GAAAAGTCTGGTAGCT | 23 | 21628 | 21643 | 1119 |
| 827378 | N/A | N/A | TGGTGTGACCATTTGG | 9 | 21643 | 21658 | 1120 |
| 827379 | N/A | N/A | ATGGTGTGACCATTTG | 15 | 21644 | 21659 | 1121 |
| 827380 | N/A | N/A | AAATGGTGTGACCATT | 46 | 21646 | 21661 | 1122 |
| 827381 | N/A | N/A | TAAATGGTGTGACCAT | 25 | 21647 | 21662 | 1123 |
| 827392 | N/A | N/A | CGATTACAGGGATTCA | 15 | 21750 | 21765 | 593 |
| 827394 | N/A | N/A | GTACGATTACAGGGAT | 11 | 21753 | 21768 | 1125 |
| 827395 | N/A | N/A | AGTACGATTACAGGGA | 8 | 21754 | 21769 | 1126 |
| 827396 | N/A | N/A | TAGTACGATTACAGGG | 29 | 21755 | 21770 | 1127 |
| 827397 | N/A | N/A | CTAGTACGATTACAGG | 23 | 21756 | 21771 | 1128 |
| 827398 | N/A | N/A | ACTAGTACGATTACAG | 15 | 21757 | 21772 | 1129 |
| 827399 | N/A | N/A | CACTAGTACGATTACA | 39 | 21758 | 21773 | 1130 |
| 827410 | N/A | N/A | GAATCAGTATAATGTG | 16 | 22306 | 22321 | 595 |
| 827413 | N/A | N/A | CCTATGAGAATCAGTA | 14 | 22313 | 22328 | 1133 |
| 827414 | N/A | N/A | GCCTATGAGAATCAGT | 13 | 22314 | 22329 | 1134 |
| 827415 | N/A | N/A | CTATAGTGGCCTATGA | 33 | 22322 | 22337 | 1135 |
| 827416 | N/A | N/A | GATACACACTAAGCAC | 22 | 22342 | 22357 | 1136 |
| 827417 | N/A | N/A | AGATACACACTAAGCA | 29 | 22343 | 22358 | 1137 |
| 827429 | N/A | N/A | CTGCCCCCATGGAAAG | 70 | 22782 | 22797 | 597 |
| 827432 | N/A | N/A | GGTGAGCCCTTCGCAC | 3 | 22828 | 22843 | 1140 |
| 827433 | N/A | N/A | TGAAGGAGAGGCTACA | 45 | 22866 | 22881 | 1141 |
| 827434 | N/A | N/A | ATTCTAGGATGTACTG | 36 | 22926 | 22941 | 1142 |
| 827435 | N/A | N/A | GTGACATACTGGTGCA | 3 | 22943 | 22958 | 1143 |
| 827436 | N/A | N/A | GGGATATTCCACTGGC | 29 | 22983 | 22998 | 1144 |
| 827437 | N/A | N/A | AACTAGGTGATCCGGG | 11 | 22996 | 23011 | 1145 |
| 827448 | N/A | N/A | CTGCAGTAGGACTGCA | 111 | 23326 | 23341 | 598 |
| 827451 | N/A | N/A | GGTGAGCACGGAGCTG | 14 | 23471 | 23486 | 1148 |
| 827452 | N/A | N/A | GGAGAAAGTGTGACCA | 56 | 23489 | 23504 | 1149 |
| 827453 | N/A | N/A | GAGCAGGGTTAAAGGA | 49 | 23502 | 23517 | 1150 |
| 827454 | N/A | N/A | TGTCATCTAGGAGATA | 70 | 23597 | 23612 | 1151 |
| 827455 | N/A | N/A | TTGCATAGATCCTGTC | 35 | 23609 | 23624 | 1152 |
| 827456 | N/A | N/A | CTTGATGACAGGAGCC | 38 | 23660 | 23675 | 1153 |
| 827468 | N/A | N/A | CGCCATGGAGCAAGCA | 67 | 24238 | 24253 | 600 |
| 827471 | N/A | N/A | GGACTATGTGGCACCT | 47 | 24342 | 24357 | 1156 |
| 827472 | N/A | N/A | TGGCAACCCCTGAGCT | 59 | 24412 | 24427 | 1157 |
| 827473 | N/A | N/A | GTTCAGGAAGACCCGC | 65 | 24437 | 24452 | 1158 |
| 827474 | N/A | N/A | GCAGAGGCGGGAATCC | 49 | 24524 | 24539 | 1159 |
| 827475 | N/A | N/A | CATCAGGGACAGACCT | 43 | 24564 | 24579 | 1160 |
| 827476 | N/A | N/A | CTGCAATCTGAGGCGC | 58 | 24761 | 24776 | 1161 |
| 827488 | N/A | N/A | GGACAATTCCTTGACA | 36 | 26078 | 26093 | 602 |
| 827491 | N/A | N/A | ACCTTAGGAGCCATTG | 18 | 26493 | 26508 | 1164 |
| 827492 | N/A | N/A | ACCCATGTATCTTCTA | 44 | 26627 | 26642 | 1165 |
| 827493 | N/A | N/A | AATGAGACAGACCCAT | 42 | 26637 | 26652 | 1166 |
| 827494 | N/A | N/A | GGATACAGTATGTCCA | 52 | 26685 | 26700 | 1167 |
| 827495 | N/A | N/A | CTCTACTATTGAATGG | 45 | 26699 | 26714 | 1168 |
| 827496 | N/A | N/A | ATTATATACCTCTACT | 58 | 26708 | 26723 | 1169 |
| 827508 | N/A | N/A | AGGTAGGGATGGACGC | 38 | 27147 | 27162 | 604 |
| 827511 | N/A | N/A | CCAGGAGGCCACGACT | 32 | 27241 | 27256 | 1172 |
| 827512 | N/A | N/A | TACAATCCTCTAAGGT | 47 | 27271 | 27286 | 1173 |
| 827513 | N/A | N/A | CTGTATACCCTGGGAC | 41 | 27378 | 27393 | 1174 |
| 827514 | N/A | N/A | TCTCAGCAATCAATAT | 75 | 27490 | 27505 | 1175 |
| 827515 | N/A | N/A | GGGAAGTAAGCCCTAG | 22 | 27559 | 27574 | 1176 |
| 827516 | N/A | N/A | GGCTGGAGATCTTTAG | 36 | 27607 | 27622 | 1177 |
| 827528 | N/A | N/A | TGGGACTTGCTAATGA | 42 | 28251 | 28266 | 606 |
| 827531 | N/A | N/A | CAGAATAGCCGGGCGC | 36 | 28650 | 28665 | 1180 |
| 827532 | N/A | N/A | GGCAGACACGAGGGTC | 31 | 28699 | 28714 | 1181 |
| 827533 | N/A | N/A | CCATACGGATGAACCT | 24 | 28741 | 28756 | 1182 |
| 827534 | N/A | N/A | TACCATACGGATGAAC | 31 | 28743 | 28758 | 1183 |
| 827535 | N/A | N/A | CTACCATACGGATGAA | 38 | 28744 | 28759 | 1184 |
| 827547 | N/A | N/A | GGTGATGTCACTTCGG | 8 | 29031 | 29046 | 608 |
| 827550 | N/A | N/A | AGGGAATTAAGCCACA | 8 | 29501 | 29516 | 1187 |
| 827551 | N/A | N/A | GGATACACCAGTGTAA | 43 | 29904 | 29919 | 1188 |
| 827552 | N/A | N/A | AGCTAAGTCAGGCGAA | 38 | 29930 | 29945 | 1189 |
| 827553 | N/A | N/A | TATGAGTGTGCCTTTG | 42 | 30329 | 30344 | 1190 |
| 827554 | N/A | N/A | TTCAAGGTTGCAAGTG | 24 | 30348 | 30363 | 1191 |
| 827555 | N/A | N/A | AGCTAAGCCAGGGACA | 59 | 30416 | 30431 | 1192 |
| 827567 | N/A | N/A | GGATAGGGTTGTGTCA | 96 | 30925 | 30940 | 610 |
| 827570 | N/A | N/A | ATCAAGGTCACTCCCA | 65 | 30959 | 30974 | 1195 |
| 827571 | N/A | N/A | GAAGACCCATTCCTAG | 69 | 30992 | 31007 | 1196 |
| 827572 | N/A | N/A | CCATATCGATCCCTCT | 67 | 31115 | 31130 | 1197 |
| 827573 | N/A | N/A | GAATTTCCTGGACCTT | 64 | 31142 | 31157 | 1198 |
| 827574 | N/A | N/A | GAAATGGTAGAGGATG | 82 | 31157 | 31172 | 1199 |
| 827575 | N/A | N/A | AGGCACGACCTACCGT | 124 | 31272 | 31287 | 1200 |

### Example 2: Effect of Modified Oligonucleotides Complementary to α-ENaC in Hep3B Cells at Various Doses

[0287] Selected oligonucleotides listed in Example 1 were tested at various doses in Hep3B cells. Cells were plated at a density of 20,000 cells per well and transfected using electroporation with 148, 444, 1,333, or 4,000 nM of modified oligonucleotide, as specified in the tables below. After a treatment period of approximately 24 hours, total RNA was isolated and analyzed as described in Example 1. As illustrated in the tables below, α-ENaC mRNA levels were reduced in a dose-dependent manner in cells treated with a modified oligonucleotide complementary to an α-ENaC nucleic acid.

TABLE 6
Percent level of human α-ENaC mRNA

| Compound | α-ENaC expression (% control) | | | |
|---|---|---|---|---|
| Number | 148 nM | 444 nM | 1,333 nM | 4,000 nM |
| 797192 | 39 | 30 | 13 | 8 |
| 797235 | 68 | 13 | 6 | 5 |
| 797294 | 41 | 25 | 13 | 5 |
| 797495 | 16 | 17 | 23 | 12 |
| 797501 | 34 | 21 | 20 | 3 |
| 797507 | 25 | 14 | 5 | 8 |
| 826229 | 74 | 17 | 8 | 4 |
| 826249 | 86 | 24 | 8 | 6 |
| 826683 | 80 | 64 | 40 | 15 |
| 826761 | 53 | 11 | 9 | 5 |
| 826799 | 40 | 26 | 12 | 7 |
| 826800 | 51 | 40 | 24 | 11 |
| 826877 | 63 | 49 | 27 | 8 |
| 827277 | 36 | 42 | 35 | 10 |
| 827372 | 9 | 14 | 1 | 2 |
| 827392 | 17 | 13 | 7 | 3 |
| 827410 | 66 | 39 | 23 | 7 |
| 827449 | 35 | 22 | 18 | 5 |
| 827547 | 11 | 5 | 4 | 1 |

TABLE 7
Percent level of human α-ENaC mRNA

| Compound | α-ENaC expression (% control) | | | |
|---|---|---|---|---|
| Number | 148 nM | 444 nM | 1,333 nM | 4,000 nM |
| 797469 | 78 | 49 | 24 | 16 |
| 797501 | 46 | 29 | 40 | 20 |
| 826232 | 40 | 43 | 16 | 7 |
| 826233 | 74 | 49 | 19 | 28 |
| 826626 | 70 | 51 | 38 | 9 |
| 826743 | 75 | 43 | 25 | 12 |
| 826763 | 65 | 25 | 24 | 7 |
| 826764 | 58 | 43 | 34 | 25 |
| 826784 | 81 | 50 | 16 | 15 |
| 826819 | 42 | 26 | 15 | 3 |
| 826821 | 73 | 51 | 29 | 10 |
| 826878 | 38 | 32 | 22 | 2 |
| 826880 | 35 | 30 | 11 | 17 |
| 827179 | 50 | 28 | 8 | 5 |
| 827199 | 39 | 14 | 18 | 9 |
| 827278 | 33 | 22 | 10 | 9 |
| 827393 | 48 | 23 | 9 | 6 |
| 827432 | 59 | 49 | 18 | 7 |
| 827550 | 77 | 53 | 38 | 14 |

TABLE 8
Percent level of human α-ENaC mRNA

| Compound | α-ENaC expression (% control) | | | |
|---|---|---|---|---|
| Number | 148 nM | 444 nM | 1,333 nM | 4,000 nM |
| 797501 | 27 | 17 | 10 | 5 |
| 826213 | 35 | 23 | 16 | 9 |
| 826411 | 57 | 30 | 23 | 7 |
| 826451 | 80 | 59 | 30 | 27 |
| 826508 | 55 | 42 | 25 | 11 |
| 826668 | 34 | 27 | 13 | 16 |
| 826687 | 69 | 34 | 29 | 6 |
| 826688 | 43 | 22 | 6 | 4 |
| 826746 | 34 | 21 | 21 | 9 |
| 826785 | 39 | 23 | 9 | 4 |
| 827042 | 57 | 30 | 18 | 15 |
| 827081 | 37 | 11 | 6 | 3 |
| 827200 | 35 | 19 | 11 | 7 |
| 827280 | 19 | 15 | 7 | 4 |
| 827318 | 51 | 21 | 11 | 11 |
| 827378 | 44 | 29 | 8 | 12 |
| 827395 | 44 | 22 | 19 | 4 |
| 827414 | 54 | 27 | 15 | 14 |
| 827435 | 28 | 19 | 7 | 3 |

TABLE 9
Percent level of human α-ENaC mRNA

| Compound | α-ENaC expression (% control) | | | |
|---|---|---|---|---|
| Number | 148 nM | 444 nM | 1,333 nM | 4,000 nM |
| 797309 | 53 | 15 | 12 | 8 |
| 797501 | 24 | 20 | 16 | 11 |
| 826334 | 65 | 43 | 26 | 23 |
| 826392 | 46 | 26 | 25 | 5 |
| 826393 | 57 | 12 | 12 | 7 |
| 826394 | 51 | 32 | 16 | 17 |
| 826591 | 44 | 14 | 13 | 6 |
| 826631 | 22 | 10 | 9 | 2 |
| 826632 | 38 | 22 | 13 | 14 |
| 826689 | 54 | 33 | 17 | 10 |
| 826809 | 21 | 12 | 10 | 2 |
| 826825 | 41 | 23 | 18 | 3 |
| 827283 | 46 | 28 | 20 | 14 |
| 827301 | 65 | 49 | 24 | 13 |
| 827359 | 18 | 15 | 6 | 3 |
| 827360 | 33 | 10 | 15 | 2 |
| 827379 | 28 | 22 | 13 | 8 |
| 827398 | 34 | 25 | 16 | 4 |
| 827437 | 37 | 24 | 8 | 11 |

TABLE 10
Percent level of human α-ENaC mRNA

| Compound | α-ENaC expression (% control) | | | |
|---|---|---|---|---|
| Number | 148 nM | 444 nM | 1,333 nM | 4,000 nM |
| 797304 | 55 | 31 | 17 | 7 |
| 797308 | 28 | 19 | 7 | 14 |
| 797494 | 44 | 35 | 14 | 11 |
| 797501 | 56 | 26 | 12 | 17 |
| 826259 | 79 | 40 | 19 | 8 |
| 826514 | 54 | 53 | 32 | 25 |
| 826655 | 65 | 46 | 32 | 18 |
| 826711 | 51 | 28 | 30 | 12 |
| 826828 | 57 | 35 | 18 | 4 |
| 826906 | 72 | 20 | 22 | 24 |
| 827148 | 74 | 47 | 34 | 23 |
| 827284 | 34 | 22 | 13 | 5 |
| 827382 | 53 | 31 | 27 | 18 |
| 827383 | 69 | 60 | 37 | 23 |
| 827419 | 33 | 18 | 13 | 5 |
| 827420 | 71 | 34 | 20 | 12 |
| 827497 | 46 | 14 | 11 | 9 |
| 827498 | 56 | 34 | 24 | 13 |
| 827518 | 65 | 33 | 15 | 14 |

TABLE 11
Percent level of human α-ENaC mRNA

| Compound | α-ENaC expression (% control) | | | |
|---|---|---|---|---|
| Number | 148 nM | 444 nM | 1,333 nM | 4,000 nM |
| 797501 | 44 | 33 | 16 | 6 |
| 826183 | 57 | 38 | 13 | 10 |
| 826202 | 77 | 35 | 25 | 5 |
| 826241 | 43 | 36 | 25 | 18 |
| 826262 | 81 | 50 | 21 | 12 |
| 826338 | 79 | 35 | 13 | 5 |
| 826558 | 80 | 53 | 24 | 16 |
| 826576 | 70 | 45 | 27 | 12 |
| 826673 | 88 | 40 | 29 | 12 |
| 826753 | 64 | 39 | 21 | 23 |
| 826754 | 67 | 47 | 22 | 11 |
| 826793 | 62 | 35 | 13 | 6 |
| 826811 | 85 | 42 | 18 | 3 |
| 827030 | 43 | 23 | 9 | 4 |
| 827149 | 42 | 38 | 23 | 11 |
| 827150 | 54 | 41 | 20 | 10 |
| 827307 | 46 | 23 | 20 | 6 |
| 827347 | 66 | 41 | 26 | 16 |
| 827441 | 30 | 13 | 11 | 1 |

TABLE 12
Percent level of human α-ENaC

| Compound | α-ENaC expression (% control) | | | |
|---|---|---|---|---|
| Number | 148 nM | 444 nM | 1,333 nM | 4,000 nM |
| 797131 | 55 | 27 | 15 | 7 |
| 797497 | 56 | 31 | 28 | 13 |
| 797501 | 34 | 23 | 24 | 5 |
| 826659 | 50 | 40 | 13 | 5 |
| 826678 | 44 | 25 | 23 | 9 |
| 826776 | 71 | 34 | 24 | 9 |
| 826794 | 52 | 25 | 18 | 9 |
| 826891 | 50 | 32 | 18 | 9 |
| 827131 | 100 | 63 | 44 | 10 |
| 827151 | 32 | 29 | 12 | 10 |
| 827270 | 54 | 33 | 23 | 11 |
| 827288 | 42 | 35 | 20 | 5 |
| 827289 | 65 | 33 | 21 | 7 |
| 827309 | 79 | 45 | 30 | 7 |
| 827348 | 69 | 54 | 33 | 10 |
| 827368 | 63 | 35 | 22 | 7 |
| 827386 | 85 | 46 | 19 | 6 |
| 827502 | 55 | 21 | 12 | 11 |
| 827524 | 78 | 39 | 26 | 14 |

TABLE 13
Percent level of human α-ENaC

| Compound | α-ENaC expression (% control) | | | |
|---|---|---|---|---|
| Number | 148 nM | 444 nM | 1,333 nM | 4,000 nM |
| 797264 | 59 | 30 | 28 | 5 |
| 797312 | 63 | 44 | 28 | 11 |
| 797501 | 47 | 12 | 6 | 3 |
| 826168 | 87 | 58 | 16 | 11 |
| 826169 | 65 | 29 | 15 | 13 |
| 826403 | 66 | 35 | 18 | 13 |
| 826484 | 65 | 46 | 23 | 11 |
| 826660 | 60 | 53 | 22 | 7 |
| 826679 | 60 | 46 | 35 | 14 |
| 826718 | 68 | 51 | 40 | 6 |
| 826796 | 66 | 61 | 36 | 9 |
| 826816 | 104 | 53 | 26 | 10 |
| 827035 | 57 | 28 | 25 | 9 |
| 827134 | 112 | 57 | 31 | 33 |
| 827175 | 43 | 39 | 13 | 7 |
| 827254 | 53 | 36 | 24 | 6 |
| 827408 | 53 | 28 | 21 | 15 |
| 827426 | 79 | 34 | 23 | 9 |
| 827447 | 35 | 18 | 13 | 10 |

TABLE 14
Percent level of human α-ENaC

| Compound | α-ENaC expression (% control) | | | |
|---|---|---|---|---|
| Number | 148 nM | 444 nM | 1,333 nM | 4,000 nM |
| 797469 | 81 | 55 | 24 | 17 |
| 797501 | 26 | 25 | 41 | 21 |
| 826232 | 39 | 32 | 14 | 5 |
| 826233 | 88 | 58 | 23 | 29 |
| 826626 | 59 | 53 | 39 | 8 |
| 826743 | 83 | 47 | 23 | 10 |
| 826763 | 77 | 24 | 20 | 9 |
| 826764 | 33 | 45 | 37 | 26 |
| 826784 | 44 | 47 | 16 | 15 |
| 826819 | 40 | 24 | 10 | 2 |
| 826821 | 81 | 52 | 31 | 11 |
| 826878 | 39 | 31 | 19 | 2 |
| 826880 | 41 | 28 | 13 | 17 |
| 827179 | 62 | 24 | 7 | 5 |
| 827199 | 44 | 14 | 20 | 10 |
| 827278 | 31 | 23 | 10 | 9 |
| 827393 | 55 | 22 | 9 | 6 |
| 827432 | 66 | 52 | 24 | 7 |
| 827550 | 62 | 43 | 36 | 16 |

TABLE 15
Percent level of human α-ENaC

| Compound | α-ENaC expression (% control) | | | |
|---|---|---|---|---|
| Number | 148 nM | 444 nM | 1,333 nM | 4,000 nM |
| 797131 | 58 | 28 | 16 | 7 |
| 797497 | 61 | 34 | 30 | 14 |
| 797501 | 37 | 24 | 26 | 5 |
| 826659 | 54 | 42 | 14 | 5 |
| 826678 | 47 | 26 | 25 | 9 |
| 826776 | 76 | 36 | 26 | 10 |
| 826794 | 57 | 28 | 19 | 10 |
| 826891 | 54 | 34 | 19 | 10 |
| 827131 | 109 | 69 | 48 | 10 |
| 827151 | 34 | 32 | 13 | 11 |
| 827270 | 57 | 35 | 25 | 11 |
| 827288 | 45 | 37 | 21 | 6 |
| 827289 | 71 | 36 | 23 | 8 |
| 827309 | 84 | 48 | 32 | 8 |
| 827348 | 73 | 58 | 35 | 11 |
| 827368 | 67 | 38 | 23 | 7 |
| 827386 | 92 | 50 | 21 | 7 |
| 827502 | 60 | 24 | 13 | 12 |
| 827524 | 83 | 41 | 28 | 15 |

### Example 3: Effect of Various Doses of Modified Oligonucleotides Complementary to Human α-ENaC In Vitro Via Free Uptake

[0288] Selected oligonucleotides were tested at various doses in A431 cells by free uptake. Cells were plated at a density of 10,000 cells per well with 16, 49, 148, 1,333, or 4,000 nM of modified oligonucleotide, as specified in the tables below. After a treatment period of approximately 24 hours, total RNA was isolated and analyzed as in Example 1. As illustrated in the tables below, α-ENaC mRNA levels were reduced in a dose-dependent manner in cells treated with a modified oligonucleotide complementary to an α-ENaC nucleic acid.

TABLE 16
Level of α-ENaC mRNA in A431 cells

| | α-ENaC expression (% control) | | | | | | |
|---|---|---|---|---|---|---|---|
| Compound | 16 | 49 | 148 | 444 | 1,333 | 4,000 | IC50 |
| Number | nM | nM | nM | nM | nM | nM | (μM) |
| 797236 | 129 | 92 | 50 | 31 | 18 | 6 | 0.23 |
| 797308 | 89 | 66 | 27 | 13 | 9 | 4 | 0.08 |
| 797313 | 94 | 82 | 47 | 25 | 15 | 9 | 0.17 |
| 797468 | 90 | 77 | 55 | 30 | 19 | 11 | 0.19 |
| 797495 | 50 | 26 | 11 | 3 | 8 | 7 | 0.01 |
| 826632 | 76 | 75 | 61 | 28 | 22 | 11 | 0.22 |
| 826743 | 85 | 81 | 57 | 28 | 23 | 19 | 0.22 |
| 826763 | 73 | 55 | 35 | 16 | 14 | 8 | 0.06 |
| 826819 | 85 | 87 | 73 | 58 | 44 | 38 | 1.06 |
| 826906 | 85 | 75 | 52 | 30 | 17 | 9 | 0.16 |

TABLE 17
Level of α-ENaC mRNA in A431 cells

| | α-ENaC expression (% control) | | | | | | |
|---|---|---|---|---|---|---|---|
| Compound | 16 | 49 | 148 | 444 | 1,333 | 4,000 | IC50 |
| Number | nM | nM | nM | nM | nM | nM | (μM) |
| 827030 | 109 | 98 | 78 | 55 | 41 | 35 | 0.97 |
| 827200 | 100 | 85 | 79 | 55 | 50 | 38 | 1.23 |
| 827288 | 85 | 71 | 53 | 33 | 13 | 21 | 0.16 |
| 827307 | 68 | 58 | 33 | 14 | 5 | 2 | 0.06 |
| 827347 | 66 | 47 | 18 | 5 | 2 | 1 | 0.04 |
| 827359 | 56 | 45 | 27 | 11 | 6 | 4 | 0.03 |
| 827372 | 47 | 22 | 7 | 3 | 1 | 1 | 0.01 |
| 827392 | 76 | 44 | 18 | 7 | 4 | 3 | 0.04 |
| 827414 | 79 | 60 | 38 | 17 | 8 | 5 | 0.08 |
| 827497 | 64 | 49 | 24 | 8 | 6 | 5 | 0.04 |

### Example 4: Tolerability of Modified Oligonucleotides Complementary to Human α-ENaC in CD1 Mice Following Systemic Delivery

[0289] CD1 ® mice (Charles River, MA) are a multipurpose mice model, frequently utilized for safety and efficacy testing. The mice were treated with modified oligonucleotides selected from studies described above and evaluated for changes in the levels of various plasma chemistry markers.

### Treatment

[0290] Groups of 6-8 week old male CD1 mice were injected subcutaneously once a week for 6 weeks with 50 mg/kg of a modified oligonucleotide listed in the tables below (50 mg/kg/week dose). Each group contained 4 mice. One group of male CD1 mice was injected subcutaneously once a week for 6 weeks with PBS. Mice were sacrificed 48 hours after the last dose, and organs and plasma were harvested for further analysis.

### Plasma Chemistry Markers

[0291] To evaluate the effect of modified oligonucleotides on liver and kidney function, plasma levels of transaminases, albumin, BUN, and billirubin were measured using an automated clinical chemistry analyzer (Hitachi Olympus AU400e, Melville, NY). The results in the tables below show that most of the tested modified oligonucleotides were well tolerated when delivered systemically, with ALT and AST levels under approximately 200 IU/L and albumin, BUN, creatine, and total bilirubin within acceptable ranges.

TABLE 18
Levels of plasma chemistry markers

| Compound | ALT | AST | | | | |
|---|---|---|---|---|---|---|
| No. | (IU/L) | (IU/L) | Albumin | BUN | Creatine | T. Bil. |
| PBS | 34.8 | 39.8 | 2.83 | 25.0 | .065 | .195 |
| 797131 | 167.8 | 162.0 | 2.39 | 21.6 | .055 | .188 |
| 797236 | 70.5 | 93.8 | 2.78 | 24.8 | .057 | .183 |
| 797258 | 1061.3 | 1077.8 | 2.91 | 25.8 | .060 | .250 |
| 797262 | 244.5 | 324.0 | 2.54 | 27.9 | .045 | .165 |
| 797264 | 484.0 | 247.3 | 2.92 | 26.1 | .080 | .178 |
| 797266 | 641.3 | 330.3 | 3.05 | 24.7 | .070 | .180 |
| 797289 | 218.8 | 175.5 | 2.66 | 21.8 | .065 | .148 |
| 797293 | 921.5 | 638.5 | 2.85 | 27.1 | .080 | .208 |
| 797294 | 248.5 | 226.0 | 2.99 | 23.1 | .043 | .268 |
| 797295 | 1262.8 | 954.3 | 3.01 | 22.7 | .063 | .408 |
| 797304 | 252.3 | 208.8 | 2.70 | 23.0 | .060 | .208 |
| 797307 | 151.3 | 123.8 | 2.97 | 25.6 | .093 | .198 |
| 797308 | 65.8 | 114.3 | 2.71 | 22.8 | .070 | .158 |
| 797312 | 1630.5 | 862.8 | 3.40 | 25.2 | .135 | .315 |
| 797313 | 46.3 | 77.0 | 3.15 | 23.4 | .140 | .203 |
| 797340 | 558.3 | 316.0 | 3.26 | 28.6 | .143 | .263 |
| 797444 | 224.0 | 285.8 | 2.23 | 27.6 | .048 | .205 |
| 797466 | 433.5 | 446.3 | 2.79 | 22.4 | .093 | .138 |
| 797468 | 87.0 | 101.8 | 2.94 | 23.4 | .120 | .145 |
| 797495 | 45.8 | 121.8 | 3.62 | 24.0 | .148 | .263 |
| 797497 | 61.0 | 78.0 | 2.95 | 24.3 | .125 | .148 |
| 797500 | 43.8 | 59.3 | 3.11 | 24.2 | .118 | .193 |
| 797501 | 546.0 | 500.8 | 2.82 | 25.6 | .115 | .303 |
| 797507 | 65.5 | 89.8 | 3.03 | 22.8 | .090 | .168 |
| 797508 | 120.5 | 188.3 | 2.41 | 23.9 | .055 | .155 |
| 797523 | 237.3 | 168.8 | 3.48 | 25.4 | .110 | .170 |

TABLE 19
Levels of plasma chemistry markers

| Compound | ALT | AST | | | | |
|---|---|---|---|---|---|---|
| No. | (IU/L) | (IU/L) | Albumin | BUN | Creatine | T. Bil. |
| PBS | 54.0 | 59.5 | 2.81 | 25.8 | .080 | .193 |
| 797192 | 2079.8 | 889.5 | 3.26 | 25.2 | .125 | .793 |
| 797309 | 112.5 | 91.5 | 2.91 | 22.5 | .078 | .165 |
| 797469 | 3698.3 | 3053.3 | 3.80 | 20.1 | .148 | .188 |
| 826183 | n.d. | n.d. | n.d. | n.d. | n.d. | n.d. |
| 826262 | 236.8 | 196.8 | 2.45 | 21.9 | .058 | .195 |
| 826393 | 116.8 | 89.8 | 2.85 | 20.5 | .070 | .168 |
| 826394 | 466.0 | 196.3 | 2.81 | 23.1 | .068 | .218 |
| 826558 | 126.8 | 117.3 | 2.97 | 21.6 | .080 | .155 |
| 826631 | 1073.5 | 1267.0 | 2.61 | 19.0 | .040 | .275 |
| 826632 | 113.3 | 129.5 | 2.94 | 22.4 | .085 | .173 |
| 826655 | 1349.8 | 754.5 | 3.13 | 21.1 | .123 | 6.315 |
| 826687 | 1174.0 | 647.0 | 2.85 | 20.0 | .075 | .178 |
| 826688 | 430.0 | 362.0 | 3.38 | 22.5 | .100 | .215 |
| 826743 | 115.0 | 111.8 | 2.94 | 21.6 | .085 | .160 |
| 826753 | 58.0 | 70.0 | 2.68 | 24.5 | .070 | .138 |
| 826763 | 77.0 | 89.3 | 2.97 | 22.9 | .083 | .203 |
| 826776 | 1685.8 | 1027.0 | 2.55 | 20.7 | .058 | .248 |
| 826793 | 1306.3 | 563.5 | 2.85 | 18.8 | .065 | .250 |
| 826796 | 1552.5 | 740.8 | 3.29 | 19.5 | .088 | .453 |
| 826811 | 439.3 | 347.5 | 3.00 | 19.5 | .085 | .438 |
| 826819 | 297.0 | 146.8 | 2.88 | 26.6 | .125 | .163 |
| 826828 | 559.0 | 314.0 | 2.71 | 17.4 | .060 | .170 |
| 826906 | 41.0 | 56.5 | 2.98 | 22.5 | .093 | .163 |
| 827030 | 44.0 | 55.8 | 3.04 | 20.0 | .093 | .180 |
| 827035 | n.d. | n.d. | n.d. | n.d. | n.d. | n.d. |

TABLE 20
Levels of plasma chemistry markers

| Compound | ALT | AST | | | | |
|---|---|---|---|---|---|---|
| No. | (IU/L) | (IU/L) | Albumin | BUN | Creatine | T. Bil. |
| PBS | 45.0 | 53.0 | 2.80 | 25.5 | .065 | .255 |
| 827148 | 33.5 | 52.3 | 2.63 | 23.8 | .080 | .223 |
| 827150 | n.d. | n.d. | n.d. | n.d. | n.d. | n.d. |
| 827175 | 123.8 | 246.8 | 2.50 | 26.1 | .078 | .218 |
| 827200 | 61.5 | 51.0 | 2.79 | 27.1 | .058 | .195 |
| 827254 | 155.3 | 161.5 | 2.77 | 26.9 | .068 | .265 |
| 827288 | 65.8 | 59.5 | 2.77 | 22.5 | .068 | .280 |
| 827307 | 55.5 | 61.0 | 2.70 | 26.3 | .053 | .203 |
| 827347 | 52.5 | 60.0 | 2.72 | 25.9 | .063 | .140 |
| 827348 | 284.5 | 197.5 | 2.99 | 21.9 | .070 | .330 |
| 827359 | 65.8 | 72.8 | 2.60 | 22.7 | .063 | .210 |
| 827360 | 45.8 | 52.8 | 2.68 | 24.1 | .088 | .188 |
| 827372 | 49.0 | 51.5 | 2.73 | 24.7 | .053 | .213 |
| 827382 | 33.3 | 45.8 | 2.69 | 22.0 | .048 | .183 |
| 827392 | 39.5 | 57.0 | 2.77 | 21.3 | .063 | .163 |
| 827393 | 207.5 | 118.8 | 2.82 | 24.2 | .050 | .220 |
| 827398 | 121.3 | 181.3 | 2.66 | 22.8 | .045 | .178 |
| 827408 | 339.8 | 292.5 | 2.53 | 28.0 | .048 | .143 |
| 827410 | 205.8 | 436.8 | 2.66 | 19.7 | .040 | .163 |
| 827414 | 145.8 | 123.0 | 2.59 | 23.2 | .055 | .148 |
| 827419 | 62.0 | 73.3 | 2.68 | 27.5 | .065 | .178 |
| 827437 | 63.8 | 103.8 | 2.56 | 19.5 | .050 | .243 |
| 827449 | 300.0 | 211.3 | 2.49 | 22.0 | .040 | .168 |
| 827497 | 100.5 | 112.8 | 2.19 | 22.0 | .043 | .170 |
| 827502 | 126.3 | 106.3 | 2.36 | 22.9 | .043 | .108 |

### Organ Weights

[0292] Organ weights were measured at the end of the study, and kidney, liver, and spleen weights are presented in the table below. The results provide additional evidence that most of the modified oligonucleotides were well tolerated when delivered systemically.

TABLE 21
Organ weights

| Compound No. | Kidney (g) | Liver (g) | Spleen (g) |
|---|---|---|---|
| PBS | 0.678 | 2.542 | 0.133 |
| 797131 | 0.598 | 2.263 | 0.151 |
| 797236 | 0.621 | 2.281 | 0.195 |
| 797258 | 0.719 | 3.663 | 0.212 |
| 797262 | 0.625 | 3.214 | 0.127 |
| 797264 | 0.496 | 2.485 | 0.169 |
| 797266 | 0.547 | 2.633 | 0.169 |
| 797289 | 0.618 | 3.064 | 0.165 |
| 797293 | 0.647 | 2.197 | 0.200 |
| 797294 | 0.566 | 1.675 | 0.154 |
| 797295 | 0.558 | 2.147 | 0.170 |
| 797304 | 0.691 | 3.263 | 0.173 |
| 797307 | 0.607 | 2.546 | 0.203 |
| 797308 | 0.616 | 2.113 | 0.143 |
| 797312 | 0.562 | 2.941 | 0.123 |
| 797313 | 0.536 | 2.236 | 0.138 |
| 797340 | 0.529 | 2.325 | 0.144 |
| 797444 | 0.580 | 6.846 | 0.551 |
| 797466 | 0.491 | 2.289 | 0.222 |
| 797468 | 0.617 | 2.275 | 0.145 |
| 797495 | 0.602 | 2.300 | 0.128 |
| 797497 | 0.651 | 2.483 | 0.151 |
| 797500 | 0.563 | 2.031 | 0.119 |
| 797501 | 0.479 | 2.978 | 0.140 |
| 797507 | 0.551 | 2.359 | 0.115 |
| 797508 | 0.469 | 1.322 | 0.148 |
| 797523 | 0.560 | 2.614 | 0.172 |

TABLE 22
Organ weights

| Compound No. | Kidney (g) | Liver (g) | Spleen (g) |
|---|---|---|---|
| PBS | 0.610 | 2.212 | 0.138 |
| 797192 | 0.530 | 4.632 | 0.157 |
| 797309 | 0.586 | 2.160 | 0.115 |
| 797469 | 0.633 | 4.636 | 0.238 |
| 826183 | n.d. | n.d. | n.d. |
| 826262 | 0.609 | 2.197 | 0.227 |
| 826393 | 0.508 | 3.084 | 0.210 |
| 826394 | 0.530 | 2.914 | 0.206 |
| 826558 | 0.567 | 2.048 | 0.149 |
| 826631 | 0.587 | 2.361 | 0.169 |
| 826632 | 0.595 | 2.442 | 0.136 |
| 826655 | 0.588 | 3.511 | 0.113 |
| 826687 | 0.619 | 2.750 | 0.261 |
| 826688 | 0.546 | 2.418 | 0.214 |
| 826743 | 0.608 | 2.162 | 0.110 |
| 826753 | 0.538 | 2.364 | 0.140 |
| 826763 | 0.542 | 2.478 | 0.144 |
| 826776 | 0.574 | 4.112 | 0.386 |
| 826793 | 0.555 | 2.295 | 0.173 |
| 826796 | 0.605 | 2.566 | 0.151 |
| 826811 | 0.557 | 2.085 | 0.133 |
| 826819 | 0.517 | 2.559 | 0.144 |
| 826828 | 0.590 | 2.046 | 0.191 |
| 826906 | 0.561 | 2.121 | 0.123 |
| 827030 | 0.564 | 1.974 | 0.114 |
| 827035 | n.d. | n.d. | n.d. |

TABLE 23
Organ weights

| Compound No. | Kidney (g) | Liver (g) | Spleen (g) |
|---|---|---|---|
| PBS | 0.615 | 2.172 | 0.108 |
| 827148 | 0.623 | 2.413 | 0.142 |
| 827150 | n.d. | n.d. | n.d. |
| 827175 | 0.683 | 2.521 | 0.139 |
| 827200 | 0.640 | 2.682 | 0.127 |
| 827254 | 0.631 | 2.589 | 0.139 |
| 827288 | 0.579 | 2.341 | 0.138 |
| 827307 | 0.614 | 2.391 | 0.133 |
| 827347 | 0.596 | 2.235 | 0.152 |
| 827348 | 0.678 | 2.832 | 0.251 |
| 827359 | 0.647 | 2.316 | 0.146 |
| 827360 | 0.517 | 2.098 | 0.147 |
| 827372 | 0.657 | 2.120 | 0.140 |
| 827382 | 0.574 | 2.089 | 0.142 |
| 827392 | 0.595 | 2.208 | 0.124 |
| 827393 | 0.603 | 2.307 | 0.137 |
| 827398 | 0.590 | 2.249 | 0.141 |
| 827408 | 0.751 | 2.399 | 0.290 |
| 827410 | 0.653 | 3.247 | 0.174 |
| 827414 | 0.663 | 2.787 | 0.185 |
| 827419 | 0.682 | 2.327 | 0.150 |
| 827437 | 0.674 | 2.523 | 0.544 |
| 827449 | 0.619 | 2.798 | 0.155 |
| 827497 | 0.630 | 2.368 | 0.189 |
| 827502 | 0.674 | 3.082 | 0.183 |

### Example 5: Establishment of a Transgenic Mouse Line Expressing Human α-ENaC

[0293] A transgenic mouse was developed to analyze knockdown of human α-ENaC in a mouse model. A 41,279 bp portion of the gene for human α-ENaC ABC14-50929300K14 (digested with NotI) was microinjected into embryos of C57BL/6 WT mice. Five transgene positive F0 mouse pups were obtained, and one founder was used to generate a C57BL/6 hα-ENaC mouse line. The line was evaluated for expression of hα-ENaC in tongue, brain, heart, colon, trachea, pancreas, kidney, liver, spleen, skeletal muscle, fat, uterus, and both total lung and lung fractions. The mouse model exhibits hα-ENaC expression in a variety of tissues, and, importantly, high levels of expression in all fractions of the lung.

### Example 6: Effect of Modified Oligonucleotides on Human α-ENaC Expression in a Transgenic Mouse

### Treatment

[0294] Transgenic mice were maintained on a 12-hour light/dark cycle and were fed ad libitum normal diet. Animals were acclimated for at least 7 days in the research facility before initiation of the experiment. Modified oligonucleotides were prepared in buffered saline (PBS) and sterilized by filtering through a 0.2 micron filter. Oligonucleotides were dissolved in 0.9% PBS for injection.

[0295] The C57Bl/6-TG(hα-ENaC) mice weighing ˜20 g were divided into groups of 2-4 mice. Groups of mice were administered 2.5 mg/kg of modified oligonucleotide twice a week for two weeks (5 mg/kg/week) via oropharyngeal aspiration. A control group of 6 mice was given PBS twice per week for two weeks. The PBS group served as the control group to which animals dosed with modified oligonucleotide were compared. Mice were sacrificed 48 hrs after the last dose and organs were harvested for further analysis.

### Human α-ENaC Expression Levels

[0296] Total RNA was isolated from the whole lung and human α-ENaC mRNA levels were measured as described in Example 1. Results are presented in the table below as percent reduction of the amount of α-ENaC mRNA relative to untreated control. As illustrated in the table below, α-ENaC mRNA levels were reduced in lung of modified oligonucleotide-treated animals.

TABLE 24
Percent level of human α-ENaC mRNA

| | Tissue | | | |
|---|---|---|---|---|
| Compound No. | Lung | Liver | Colon | Kidney |
| 797236 | 41 | 62 | 85 | 87 |
| 797308* | 36 | 41 | 99 | 87 |
| 797313 | 41 | 54 | 87 | 89 |
| 797468 | 45 | 64 | 77 | 102 |
| 797495 | 27 | 30 | 69 | 66 |
| 826632** | 40 | 81 | 77 | 87 |
| 826743 | 46 | 73 | 106 | 101 |
| 826763 | 32 | 51 | 94 | 96 |
| 826819 | 45 | 50 | 93 | 86 |
| 826906 | 42 | 64 | 107 | 101 |
| 827030 | 45 | 59 | 90 | 73 |
| 827200 | 51 | 72 | 101 | 129 |
| 827288 | 54 | 66 | 105 | 75 |
| 827307 | 34 | 68 | 85 | 91 |
| 827347 | 28 | 66 | 97 | 103 |
| 827359* | 34 | 37 | 82 | 90 |
| 827372 | 21 | 29 | 50 | 70 |
| 827392 | 28 | 50 | 73 | 72 |
| 827414 | 36 | 45 | 84 | 93 |
| 827497 | 34 | 61 | 90 | 86 |

*Group contained 3 mice
**Group contained 2 mice
All other groups contained 4 mice

### Example 7: Dose-Response of Compound 827359 on Human α-ENaC Expression in a Transgenic Mouse

### Treatment

[0297] Transgenic mice were maintained on a 12-hour light/dark cycle and were fed ad libitum normal diet. Animals were acclimated for at least 7 days in the research facility before initiation of the experiment. Modified oligonucleotides were prepared in buffered saline (PBS) and sterilized by filtering through a 0.2 micron filter. Oligonucleotides were dissolved in 0.9% PBS.

[0298] The C57Bl/6-TG(hα-ENaC) mice weighing ˜20 g were divided into groups of 12 mice. Groups of 12 mice were administered 0.033, 0.1, 0.33 or 1.0 mg/kg of modified oligonucleotide twice a week for three weeks (5 mg/kg/week) via aerosol dosing. A control group of 12 mice was given aerosol saline twice per week for 3 weeks. The PBS group served as the control group to which animals dosed with modified oligonucleotide were compared. Mice were sacrificed 3 days after the last dose and organs were harvested for further analysis.

### Human α-ENaC Expression Levels

[0299] Total RNA was isolated from the whole lung and human α-ENaC mRNA levels were measured by quantitative real-time PCR as described in Example 1. Results are presented in the table below as percent reduction of the amount of α-ENaC mRNA relative to untreated control. As illustrated in the table below, α-ENaC mRNA levels were reduced in a dose-dependent manner in modified oligonucleotide-treated animals.

TABLE 25
Dose Response of 827359 in transgenic mouse

| Conc. 827359 | % |
|---|---|
| (mg/kg/dose) | Control |
| 0 [Saline] | 100.0 |
| 0.033 | 73.4 |
| 0.100 | 50.4 |
| 0.330 | 38.1 |
| 1.000 | 33.3 |

### Example 8: Human Peripheral Blood Mononuclear Cells (hPBMC) Assay

[0300] The hPBMC assay was performed using BD Vautainer CPT tube method. A sample of whole blood from volunteered donors with informed consent at US HealthWorks clinic (Faraday & El Camino Real, Carlsbad) was obtained and collected in 4-15 BD Vacutainer CPT 8 ml tubes (VWR Cat. #BD362753). The approximate starting total whole blood volume in the CPT tubes for each donor was recorded using the PBMC assay data sheet.

[0301] The blood sample was remixed immediately prior to centrifugation by gently inverting tubes 8-10 times. CPT tubes were centrifuged at rt (18-25° C.) in a horizontal (swing-out) rotor for 30 min. at 1500-1800 RCF with brake off (2700 RPM Beckman Allegra 6R). The cells were retrieved from the buffy coat interface (between Ficoll and polymer gel layers); transferred to a sterile 50 ml conical tube and pooled up to 5 CPT tubes/50 ml conical tube/donor. The cells were then washed twice with PBS (Ca⁺⁺, Mg⁺⁺ free; GIBCO). The tubes were topped up to 50 ml and mixed by inverting several times. The sample was then centrifuged at 330 × g for 15 minutes at rt (1215 RPM in Beckman Allegra 6R) and aspirated as much supernatant as possible without disturbing pellet. The cell pellet was dislodged by gently swirling tube and resuspended cells in RPMI+10% FBS+pen/strep (˜1 ml/10 ml starting whole blood volume). A 60 μl sample was pipette into a sample vial (Beckman Coulter) with 600 μl VersaLyse reagent (Beckman Coulter Cat #A09777) and was gently vortexed for 10-15 sec. The sample was allowed to incubate for 10 min. at rt and being mixed again before counting. The cell suspension was counted on Vicell XR cell viability analyzer (Beckman Coulter) using PBMC cell type (dilution factor of 1:11 was stored with other parameters). The live cell/ml and viability were recorded. The cell suspension was diluted to 1×10⁷ live PBMC/ml in RPMI+10% FBS+pen/strep.

[0302] The cells were plated at 5×10⁵ in 50 μl/well of 96-well tissue culture plate (Falcon Microtest). 50 μl/well of 2×concentration oligos/controls diluted in RPMI+10% FBS+pen/strep. was added according to experiment template (100 μl/well total). Plates were placed on the shaker and allowed to mix for approx. 1 min. After being incubated for 24 hrs at 37° C.; 5% CO₂, the plates were centrifuged at 400×g for 10 minutes before removing the supernatant for MSD cytokine assay (i.e. human IL-6, IL-10, and TNF-α).

[0303] Compound 353512 is an internal standard known to be a high responder for IL-6 release in the assay, while compound 104838 is a negative control. The hPBMCs were isolated from fresh, volunteered donors and were treated with modified oligonucleotide at 0.064, 0.32, and 1.6 200 μM concentrations. After a 24 hr treatment, the cytokine levels were measured and averaged across two donors. The results presented in the table below show that selected modified oligonucleotides targeting human α-ENaC have low proinflammatory responses in human peripheral mononuclear blood cells.

TABLE 26
Modified oligonucleotides tested as
controls in hPBMC assay

| Compound | | | SEQ |
|---|---|---|---|
| No. | Sequence (5′ to 3′) | Target | ID No. |
| 104838 | Gₑₛ^{m}CₑₛTₑₛGₑₛAₑₛT_{ds}T_{ds}A_{ds}G_{ds}A_{ds}G_{ds} | TNFα | 1969 |
| | A_{ds}G_{ds}A_{ds}G_{ds}GₑₛTₑₛ^{m}Cₑₛ^{m}Cₑₛ^{m}Cₑ | | |
| 353512 | Tₑₛ^{m}Cₑₛ^{m}Cₑₛ^{m}C_{ds}A_{ds}T_{ds}T_{ds}T_{ds}^{m}C_{ds}A_{ds}G_{ds} | CRP | 1970 |
| | G_{ds}A_{ds}G_{ds}A_{ds}^{m}C_{ds}^{m}C_{ds}TₑₛGₑₛGₑ | | |

TABLE 27
Results of hPBMC Assay for Selected Modified Oligonucleotides

| Compound | | IL-10 | IL-6 | TNF-α |
|---|---|---|---|---|
| No. | Dose | (pg/mL) | (pg/mL) | (pg/mL) |
| 104838 | 0.064 | 7.4 | 63.4 | 10.5 |
| (− control) | 0.32 | 8.9 | 75.2 | 11.6 |
| | 1.6 | 12.7 | 118.9 | 19.2 |
| 353512 | 0.064 | 26.7 | 130.0 | 14.6 |
| (+ control) | 0.32 | 39.9 | 199.9 | 17.0 |
| | 1.6 | 33.0 | 230.4 | 27.7 |
| 797236 | 0.064 | 9.4 | 59.2 | 10.4 |
| | 0.32 | 20.1 | 105.5 | 13.4 |
| | 1.6 | 27.3 | 173.1 | 19.5 |
| 797308 | 0.064 | 5.6 | 55.9 | 9.3 |
| | 0.32 | 7.6 | 60.7 | 10.8 |
| | 1.6 | 9.5 | 83.6 | 13.4 |
| 797313 | 0.064 | 4.6 | 56.0 | 8.8 |
| | 0.32 | 8.9 | 55.5 | 10.7 |
| | 1.6 | 14.2 | 95.8 | 14.7 |
| 797468 | 0.064 | 7.1 | 94.0 | 9.9 |
| | 0.32 | 6.7 | 53.4 | 9.7 |
| | 1.6 | 11.8 | 103.5 | 15.0 |
| 797495 | 0.064 | 5.5 | 63.1 | 9.6 |
| | 0.32 | 8.5 | 58.9 | 10.8 |
| | 1.6 | 8.9 | 83.1 | 15.2 |
| 826262 | 0.064 | 6.1 | 50.8 | 9.7 |
| | 0.32 | 13.0 | 81.5 | 12.2 |
| | 1.6 | 10.4 | 98.2 | 14.2 |
| 826632 | 0.064 | 4.1 | 55.0 | 9.4 |
| | 0.32 | 6.6 | 65.8 | 10.8 |
| | 1.6 | 7.5 | 111.3 | 15.5 |
| 826743 | 0.064 | 4.4 | 60.1 | 9.2 |
| | 0.32 | 7.7 | 63.8 | 11.1 |
| | 1.6 | 6.0 | 81.8 | 16.1 |
| 826763 | 0.064 | 4.5 | 58.2 | 9.6 |
| | 0.32 | 8.9 | 63.1 | 10.8 |
| | 1.6 | 11.6 | 116.7 | 20.9 |
| 826819 | 0.064 | 4.7 | 51.6 | 8.2 |
| | 0.32 | 4.3 | 52.5 | 7.9 |
| | 1.6 | 7.3 | 62.8 | 11.3 |
| 826906 | 0.064 | 4.4 | 48.3 | 7.6 |
| | 0.32 | 4.8 | 68.9 | 9.2 |
| | 1.6 | 6.3 | 60.4 | 13.9 |
| 827030 | 0.064 | 3.7 | 40.8 | 7.9 |
| | 0.32 | 5.4 | 42.4 | 7.5 |
| | 1.6 | 4.5 | 54.1 | 8.4 |
| 827200 | 0.064 | 4.2 | 49.4 | 8.9 |
| | 0.32 | 5.3 | 67.6 | 9.5 |
| | 1.6 | 5.4 | 55.2 | 9.5 |
| 827288 | 0.064 | 4.5 | 44.1 | 7.7 |
| | 0.32 | 6.0 | 50.2 | 8.7 |
| | 1.6 | 7.6 | 76.3 | 14.9 |
| 827307 | 0.064 | 4.6 | 62.2 | 9.9 |
| | 0.32 | 5.3 | 52.3 | 9.0 |
| | 1.6 | 5.0 | 54.1 | 10.6 |
| 827347 | 0.064 | 8.3 | 53.6 | 10.9 |
| | 0.32 | 20.7 | 115.2 | 12.8 |
| | 1.6 | 33.9 | 163.3 | 21.1 |
| 827359 | 0.064 | 5.8 | 61.8 | 9.4 |
| | 0.32 | 6.2 | 52.7 | 10.3 |
| | 1.6 | 11.0 | 75.2 | 11.8 |
| 827372 | 0.064 | 4.7 | 56.5 | 8.8 |
| | 0.32 | 7.3 | 65.4 | 9.6 |
| | 1.6 | 13.1 | 81.3 | 13.1 |
| 827392 | 0.064 | 4.5 | 45.5 | 7.7 |
| | 0.32 | 5.1 | 48.0 | 8.8 |
| | 1.6 | 5.4 | 50.9 | 9.9 |
| 827414 | 0.064 | 5.5 | 51.6 | 8.7 |
| | 0.32 | 7.6 | 58.1 | 10.3 |
| | 1.6 | 16.6 | 102.4 | 16.3 |
| 827419 | 0.064 | 4.2 | 52.5 | 7.9 |
| | 0.32 | 7.5 | 62.0 | 11.2 |
| | 1.6 | 8.0 | 93.8 | 16.5 |
| 827497 | 0.064 | 4.5 | 50.5 | 8.3 |
| | 0.32 | 5.1 | 56.9 | 9.5 |
| | 1.6 | 5.8 | 73.7 | 13.0 |

### Example 9: Effects of a Modified Oligonucleotide Complementary to α-ENaC in a Mouse Model of Cystic Fibrosis

[0304] A modified oligonucleotide complementary to mouse α-ENaC was tested for its effects on preventing and treating airway restriction in a mouse model of cystic fibrosis. Treatment of wild type mice with a modified oligonucleotide complementary to Nedd4L induced a cystic fibrosis-like phenotype (See Crosby et al. J. of Cystic Fibrosis, 2017). Compound 668395 has a 3-10-3 phosphothiorate cEt gapmer motif. It is 16 nucleobases in length, wherein the central gap segment contains ten 2′-deoxynucleosides and is flanked by wing segments on the 3′ and 5′ ends, each containing three cEt nucleosides. All cytosine residues throughout the modified oligonucletoide are 5-methyl cytosines. The internucleoside linkages are all phosphorothioate internucleoside linkages. The sequence is GAGCATCTAATACAGC (SEQ ID NO: 1958), which is 100% complementary to mouse α-ENaC.

[0305] Adult mice were treated twice a week for 2 weeks with compound 668395 or vehicle (control) at 0.33 mg/kg/dose via aerosol dosing. Then, mice were treated with an antisense oligonucleotide that reduces Nedd4L (Nedd 4L ASO) via oropharyngeal dosing at 10 mg/kg/dose once a week for 6 weeks. After 8 weeks, airway restriction was tested with a methacholine challenge. Lung function was measured using the Penh score obtained through unrestrained plethysmography. A higher Penh score indicates more lung constriction. Each group contained 8 mice. The results, shown in the table below, indicate that pre-treatment with a modified oligonucleotide complementary to α-ENaC prevented the decrease in lung function observed in the cycstic fibrosis mouse model.

TABLE 28
Penh scores

| | Methacholine (mg/mL) | | | | |
|---|---|---|---|---|---|
| | 0 | 3 | 6 | 12 | 25 |
| Treatment | Penh score | | | | |
| Naïve (saline) | 0.7 | 0.9 | 1.1 | 1.3 | 1.7 |
| Vehicle + Nedd4L ASO | 1.2 | 1.7 | 2.1 | 3.7 | 5.4 |
| Compound No. 668395 + | 0.9 | 0.8 | 1.0 | 1.2 | 2.1 |
| Nedd4L ASO | | | | | |

[0306] In order to test the effect of a modified oligonucleotide complementary to mouse α-ENaC on reversal of airway restriction in a mouse model of cystic fibrosis, adult mice were treated with Nedd4L ASO via oropharyngeal dosing at 10 mg/kg/dose once a week for a total of 9 weeks; and compound 668395 was not administered until week 6. Starting at 6 weeks, mice were administered compound 668395, vehicle, or a control 3-10-3 cEt modified oligonucleotide (control compound) via aerosol dosing three times per week for three weeks. Lung function was tested with a methacholine challenge prior to the first treatment at 6 weeks and at 9 weeks, and Penh scores were obtained through unrestrained plethysmography. Each group contained 12 mice. The results, shown in the tables below, indicate that treatment with a modified oligonucleotide complementary to α-ENaC restored lung function in a mouse model of cystic fibrosis.

TABLE 29
Penh scores at 6 weeks

| | Methacholine (mg/mL) | | | | |
|---|---|---|---|---|---|
| | 0 | 3 | 6 | 12 | 25 |
| Treatment | Penh score | | | | |
| Naïve (no treatment) | 0.7 | 0.8 | 0.9 | 1.3 | 2.4 |
| Nedd4L ASO (baseline scores for | 0.9 | 1.3 | 1.7 | 3.1 | 4.5 |
| vehicle group) | | | | | |
| Nedd4L ASO (baseline scores for | 0.8 | 1.2 | 1.6 | 2.5 | 4.7 |
| compound 668395 group) | | | | | |
| Nedd4L ASO (baseline scores for | 1.0 | 1.3 | 1.8 | 2.9 | 5.1 |
| control compound group) | | | | | |

TABLE 30
Penh scores at 9 weeks

| | Methacholine (mg/mL) | | | | |
|---|---|---|---|---|---|
| | 0 | 3 | 6 | 12 | 25 |
| Treatment | Penh score | | | | |
| Naïve (saline) | 0.7 | 0.9 | 0.9 | 1.0 | 1.8 |
| Nedd4L ASO + vehicle | 1.1 | 1.2 | 1.5 | 2.3 | 4.0 |
| Nedd4L ASO + compound 668395 | 0.9 | 1.0 | 1.1 | 1.3 | 1.9 |
| Nedd4L ASO + control compound | 1.1 | 1.1 | 1.6 | 2.4 | 4.2 |

### Example 10: Effect of Modified Oligonucleotides Complementary to Human α-ENaC on Cystic Fibrosis Patient Derived Primary Human Bronchial Epithelial Cells

[0307] Primary human bronchial epithelial cells from cystic fibrosis patients were obtained from Epithelix. Cells were cultured at an Air-Liquid Interface (ALI) on transwell membrane inserts (Corning®) with PneumaCult™-ALI Medium (StemCell Technologies) on the basolateral side of the membrane. At 6 weeks post seeding, cells were treated either with ION No. 827359, or with ION No. 549148 (3-10-3 cET gapmer, GGCTACTACGCCGTCA, designated herein as SEQ ID NO: 1959), that served as a negative control that does not target α-ENaC. Both modified oligonucleotides were treated using free uptake at a concentration of 1 μM on the basolateral side. Cells were lysed 72 hours post treatment.

### Human α-ENaC Expression Levels

[0308] Total RNA was isolated from the cells 72 hours post treatment. α-ENaC mRNA levels were measured using human primer probe set hSCNN1A_LTS01170. α-ENaC mRNA levels were normalized to cyclophilin A. Cyclophilin A was amplified using primer-probe set HTS3936 (forward sequence, GCCATGGAGCGCTTTGG, designated herein as SEQ ID NO: 1960; reverse sequence, TCCACAGTCAGCAATGGTGATC, designated herein as SEQ ID NO: 1961; probe sequence, TCCAGGAATGGCAAGACCAGCAAGA, designated herein as SEQ ID NO: 1962). Results are presented in the tables below as percent control of the amount of α-ENaC mRNA relative to control cells (% control).

TABLE 31
Inhibition of α-ENaC mRNA by in cystic fibrosis patient
derived primary human bronchial epithelial cells

| ION | % |
|---|---|
| No. | control |
| 549148 | 100 |
| 827359 | 7 |

### Measurement of Amiloride Sensitive Current

[0309] 72 hours post treatment with modified oligonucleotide, the transwell inserts were mounted in Ussing chambers (Physiologic Instruments, San Diego, CA). Short-circuit current (I_{sc}) was measured. Data were analyzed using ACQUIRE & ANALYZE 2.3 (Physiologic Instruments). The basolateral solution contained (in mM) 145 NaCl, 3.3 K2HPO4, 0.8 KH2PO4, 1.2 MgCl2, 1.2 CaCl₂), 10 glucose, 10 Hepes (adjusted to pH 7.35 with NaOH) and the apical solution contained (in mM) 145 sodium gluconate, 3.3 K2HPO4, 0.8 KH2PO4, 1.2 MgCl2, 1.2 CaCl₂), 10 glucose, 10 Hepes (adjusted to pH 7.35 with NaOH)_Amiloride was added to apical side at 100 μM. Amiloride-sensitive currents were measured in order to assess ENaC functional activity.

TABLE 32
Amiloride response in cystic fibrosis patient derived
primary human bronchial epithelial cells

| ION | ΔIsc |
|---|---|
| No. | (μA/cm²) |
| 549148 | −26 |
| 827359 | −9 |

### Measurement of Airway Surface Liquid (ASL)

[0310] 72 hours post start of treatment, the effect of modified oligonucleotide on Airway Surface Liquid (ASL) was measured. Immediately before measuring the ASL, cultures were washed three times with PBS to remove excess mucus. 150 μL of KBR buffer (89 mM NaCl, 4 mM KCl, 1.2 mM MgCl2, 1.2 mM CaCl₂), 1 mM Hepes, 16 mM Na-gluconate, 10 mM glucose) was added to the apical surface of the cells as the absorption volume. ASL volume was then measured 24 hours, 48 hours and 72 hours post additional of KBR buffer.

TABLE 33
ASL volume in cystic fibrosis patient derived
primary human bronchial epithelial cells

| Time | ASL volume (μL) | |
|---|---|---|
| (hr) | 549148 | 827359 |
| 0 | 150 | 150 |
| 24 hr | 62 | 84 |
| 48 hr | 20 | 67 |
| 72 hr | 18 | 38 |

### Example 11: Effect of Combination Treatment of Modified Oligonucleotides with VX-661 (Tezacaftor) and VX-770 (Ivacaftor)

[0311] Primary human bronchial epithelial cells from cystic fibrosis patients were obtained from Epithelix. Cells were cultured at an Air-Liquid Interface (ALI) on transwell membrane inserts (Corning®) with PneumaCult™-ALI Medium (Stemcell Technologies) on the basolateral side of the membrane for 6 weeks before treatment. At Day 0, Day 4 and Day 8 of treatment, cells were treated either with ION Nos. 827359, or 549148 at 10 μM on the basolateral side of the membrane (a total of 3 doses of each ASO). One set of cells was left untreated with modified oligonucleotide. At Day 11, VX-661 (Tezacaftor) (Medchem Express) was added at 18 μM to both the previously untreated well and to one of the wells treated with ION No. 827359. On Day 14, VX-770 (Ivacaftor) (Medchem Express) was added at 10 μM to the cells previously treated with VX-661. On the same day (Day 14), cultures were washed three times on the apical side with PBS to remove excess mucus. 150 μL of PBS (absorption volume) was added to the apical surface of the cells. ASL volume was measured the next day (Day 15). Combination treatment was found to further increase ASL volume compared to control.

TABLE 34
ASL volume in cystic fibrosis patient derived
primary human bronchial epithelial cells

| | ASL volume |
|---|---|
| Treatment | (μL) |
| 549148 | 23 |
| Vx-661 + Vx-770 | 38 |
| 827359 | 59 |
| Vx-661+ Vx-770 + 827359 | 66 |

1-116. (canceled)

117. An oligomeric compound comprising a modified oligonucleotide consisting of 12 to 30 linked nucleosides, wherein the modified oligonucleotide has a nucleobase sequence comprising at least 8, at least 9, at least 10, at least 11, at least 12, at least 13, at least 14, at least 15, or 16 contiguous nucleobases of any of the nucleobase sequences of SEQ ID NOs: 6-1954, wherein the modified oligonucleotide comprises at least one modification selected from a modified sugar moiety and a modified internucleoside linkage.

118. An oligomeric compound comprising a modified oligonucleotide consisting of 12 to 30 linked nucleosides, wherein the modified oligonucleotide has a nucleobase sequence at least 85%, at least 90%, at least 95% or 100% complementary to an equal length portion within nucleobases 17,951-24,120; 19,022-19,037; 20,415-20,430; 21,750-21,766; 32,129-33,174; 32,844-32,859; or 32,989-33,004 of SEQ ID NO: 2.

119. The oligomeric compound of claim 117, wherein the modified oligonucleotide has a nucleobase sequence that is at least 85% complementary to an equal length portion of any of SEQ ID NO: 1, SEQ ID NO: 2, or SEQ ID NO: 1957.

120. The oligomeric compound of claim 117, wherein the modified oligonucleotide is single-stranded.

121. The oligomeric compound of claim 117, wherein the modified oligonucleotide comprises at least one modified internucleoside linkage.

122. The oligomeric compound of claim 121, wherein the modified internucleoside linkage is a phosphorothioate internucleoside linkage.

123. The oligomeric compound of claim 117, wherein at least one nucleoside comprises at least one modified nucleobase.

124. The oligomeric compound of claim 123, wherein the modified nucleobase is a 5-methylcytosine.

125. The oligomeric compound of claim 117, wherein the modified oligonucleotide comprises at least one nucleoside comprising a modified sugar moiety.

126. The oligomeric compound of claim 125, wherein the at least one modified sugar moiety is a bicyclic sugar moiety.

127. The oligomeric compound of claim 126, wherein the bicyclic sugar moiety comprises a 4′-2′ bridge selected from 4′-CH₂—O-2′ and 4′-CH(CH₃)—O-2′.

128. The oligomeric compound of claim 125, wherein the at least one modified sugar moiety is a non-bicyclic-modified sugar moiety.

129. The oligomeric compound of claim 128, wherein the non-bicyclic sugar moiety is a 2′-O-methoxyethyl sugar moiety, or a 2′-O-methyl sugar moiety.

130. The oligomeric compound of claim 117, wherein the modified oligonucleotide comprises:
a gap segment consisting of linked deoxynucleosides;
a 5′ wing segment consisting of linked nucleosides; and
a 3′ wing segment consisting of linked nucleosides;
wherein the gap segment is positioned between the 5′ wing segment and the 3′ wing segment and wherein each nucleoside of each wing segment comprises a modified sugar.

131. The oligomeric compound of claim 130, wherein the modified oligonucleotide comprises:
a gap segment consisting of 10 linked deoxynucleosides;
a 5′ wing segment consisting of 3 linked nucleosides; and
a 3′ wing segment consisting of 3 linked nucleosides;
wherein the gap segment is positioned between the 5′ wing segment and the 3′ wing segment and wherein each nucleoside of each wing segment comprises a modified sugar.

132. The oligomeric compound of claim 131, wherein the modified oligonucleotide comprises:
a gap segment consisting of 10 linked deoxynucleosides;
a 5′ wing segment consisting of 3 linked nucleosides; and
a 3′ wing segment consisting of 3 linked nucleosides;
wherein the gap segment is positioned between the 5′ wing segment and the 3′ wing segment and wherein each nucleoside of each wing segment comprises a cEt sugar moiety.

133. A pharmaceutical composition comprising the oligomeric compound of claim 117, and a pharmaceutically acceptable diluent.

134. The pharmaceutical composition of claim 133, wherein the pharmaceutically acceptable diluent is phosphate-buffered saline.

135. A method comprising administering to an individual the pharmaceutical composition of claim 133.

136. The method of claim 135, wherein the individual is a human.

137. A method of treating cystic fibrosis, COPD, asthma, or chronic bronchitis in an individual comprising administering to the individual the pharmaceutical composition of claim 133.

The application's sequence listing, which the Patent Office published only in electronic form, follows.

SEQUENCE LISTING (1970 sequences)

SEQ ID NO: 1 - RNA, 3345 nt, Homo sapiens
  source 1..3345: mol_type = mRNA
cttgcctgtctgcgtctaaagcccctgcccagagtccgccttctcaggtccagtactcccagttcacctgccctcgggagccctccttccttcggaaaactcccggctctgactcctcctcagcccctccccccgccctgctcacctttaattgagatgctaatgagattcctgtcgcttccatccctggccggccagcgggcgggctccccagccaggccgctgcacctgtcaggggaacaagctggaggagcaggaccctagacctctgcagcccataccaggtctcatggaggggaacaagctggaggagcaggactctagccctccacagtccactccagggctcatgaaggggaacaagcgtgaggagcaggggctgggccccgaacctgcggcgccccagcagcccacggcggaggaggaggccctgatcgagttccaccgctcctaccgagagctcttcgagttcttctgcaacaacaccaccatccacggcgccatccgcctggtgtgctcccagcacaaccgcatgaagacggccttctgggcagtgctgtggctctgcacctttggcatgatgtactggcaattcggcctgcttttcggagagtacttcagctaccccgtcagcctcaacatcaacctcaactcggacaagctcgtcttccccgcagtgaccatctgcaccctcaatccctacaggtacccggaaattaaagaggagctggaggagctggaccgcatcacagagcagacgctctttgacctgtacaaatacagctccttcaccactctcgtggccggctcccgcagccgtcgcgacctgcgggggactctgccgcaccccttgcagcgcctgagggtcccgcccccgcctcacggggcccgtcgagcccgtagcgtggcctccagcttgcgggacaacaacccccaggtggactggaaggactggaagatcggcttccagctgtgcaaccagaacaaatcggactgcttctaccagacatactcatcaggggtggatgcggtgagggagtggtaccgcttccactacatcaacatcctgtcgaggctgccagagactctgccatccctggaggaggacacgctgggcaacttcatcttcgcctgccgcttcaaccaggtctcctgcaaccaggcgaattactctcacttccaccacccgatgtatggaaactgctatactttcaatgacaagaacaactccaacctctggatgtcttccatgcctggaatcaacaacggtctgtccctgatgctgcgcgcagagcagaatgacttcattcccctgctgtccacagtgactggggcccgggtaatggtgcacgggcaggatgaacctgcctttatggatgatggtggctttaacttgcggcctggcgtggagacctccatcagcatgaggaaggaaaccctggacagacttgggggcgattatggcgactgcaccaagaatggcagtgatgttcctgttgagaacctttacccttcaaagtacacacagcaggtgtgtattcactcctgcttccaggagagcatgatcaaggagtgtggctgtgcctacatcttctatccgcggccccagaacgtggagtactgtgactacagaaagcacagttcctgggggtactgctactataagctccaggttgacttctcctcagaccacctgggctgtttcaccaagtgccggaagccatgcagcgtgaccagctaccagctctctgctggttactcacgatggccctcggtgacatcccaggaatgggtcttccagatgctatcgcgacagaacaattacaccgtcaacaacaagagaaatggagtggccaaagtcaacatcttcttcaaggagctgaactacaaaaccaattctgagtctccctctgtcacgatggtcaccctcctgtccaacctgggcagccagtggagcctgtggttcggctcctcggtgttgtctgtggtggagatggctgagctcgtctttgacctgctggtcatcatgttcctcatgctgctccgaaggttccgaagccgatactggtctccaggccgagggggcaggggtgctcaggaggtagcctccaccctggcatcctcccctccttcccacttctgcccccaccccatgtctctgtccttgtcccagccaggccctgctccctctccagccttgacagcccctccccctgcctatgccaccctgggcccccgcccatctccagggggctctgcaggggccagttcctccacctgtcctctgggggggccctgagagggaaggagaggtttctcacaccaaggcagatgctcctctggtgggagggtgctggccctggcaagattgaaggatgtgcagggcttcctctcagagccgcccaaactgccgttgatgtgtggaggggaagcaagatgggtaagggctcaggaagttgctccaagaacagtagctgatgaagctgcccagaagtgccttggctccagccctgtaccccttggtactgcctctgaacactctggtttccccacccaactgcggctaagtctctttttcccttggatcagccaagcgaaacttggagctttgacaaggaactttcctaagaaaccgctgataaccaggacaaaacacaaccaagggtacacgcaggcatgcacgggtttcctgcccagcgacggcttaagccagcccccgactggcctggccacactgctctccagtagcacagatgtctgctcctcctcttgaacttgggtgggaaaccccacccaaaagccccctttgttacttaggcaattccccttccctgactcccgagggctagggctagagcagacccgggtaagtaaaggcagacccagggctcctctagcctcatacccgtgccctcacagagccatgccccggcacctctgccctgtgtctttcatacctctacatgtctgcttgagatatttcctcagcctgaaagtttccccaaccatctgccagagaactcctatgcatcccttagaaccctgctcagacaccattacttttgtgaacgcttctgccacatcttgtcttccccaaaattgatcactccgccttctcctgggctcccgtagcacactataacatctgctggagtgttgctgttgcaccatactttcttgtacatttgtgtctcccttcccaactagactgtaagtgccttgcggtcagggactgaatcttgcccgtttatgtatgctccatgtctagcccatcatcctgcttggagcaagtaggcaggagctcaataaatgtttgttgcatgaaggaaaaaaaaaaaaaaaaaa

SEQ ID NO: 2 - DNA, 37000 bp, Homo sapiens
  source 1..37000: mol_type = genomic DNA
aatcaaagtgataaacttctagtagtgaacttctttttttgtttttttttttgttttttttttttttgagacagagtcttgctttgtctcccaggctggagtgcagtggcacgatcttggctcactccaagctccacctccccggttttatgccattctcctgcctcagcctcccgagtagctgggactacaggcgtgcaccacttatgcccagctaattttttttgtaattttagtagagacggggtttcaccatgttagccaggatggcctcgatcccctgacctcatgatccacccgcctcggcctcccaaagtgctgggattacaggcgtgagccaccatgcccggccaacttctagtagtgaacttctaagtaaactgccaggggactagatgaagagtggcatttttctggtccatcattttaaatgaaagagaaatctgtaccacataagggcagctgaaaggactgttgtcttccacagtgggcagcccccagtgtgaagtggctaattagctccaagtagtaagaataaagagttgcatttaactaagtaactgattcttatcctggaaaggatagaagtgaacagggaaaagtgaagaaaatttagataaattaatagaccacaaataaatgggttgtcagaggaagttaggatgtttgaagttttgcagatgctttttcgtagcatatcccgctctgtcaaagataaactaggaaagacgccagttctgctgtcttctgcagactgggtcagcaaacagtgaccgctagacactgaggtcaccaagatgaatacgcctggtctctgtccttgtgttgcgggaagtcagggaccccaaacggatgtatacgtacaaacacacatacatcaggataatagtaaataataataataaataatagtaaacagtggtaagtgcagagataggctctccctaggagggtggagtgattacttccgtcatctcctgtccgcggagaacaagaggcaggaagaccctttgcactcataaccctcatcccatggcagcccctctggtttcacttctctccctgcagccgtgcatattttatggccacaccacagggttagaggatagctggtgttgggaggggaaggcagccctgggttggcgggaagggctggggctctgggggagtctgggggtagtcctgggaaggcagggggtccttccaagacagagtctacaaagctcttgacttcttatagaacaaaactgtacttctctcaaagtcagagaaggagaactgggcttggaaaggagtggcctggttttcagtctgaccccacccctaactcctgggtgactgtggccaagtcactttgcttctgtgggcctcagtcccctcatgcatgaagcagggggctagatgcaaggtcagctggaaaaagtctttgtccatctgggttgccttacccaccccttcttgccctttcattttctcaggtaagatcaccggggcccatagaggtcaagtgcctttctcaaagtcacatagtttaaaagcaaaaataggggctgagtatggtggctcacacttgtaatcccagcactttgggaggctgaggcaggaggactgcttgagcctaggagttggaggctgcagtgagccatgatcatgctgctgtactccagcctagaggatagtgcatgatcctgtctctaagataaataagaaaataaaagcaaaaatggaagttgtagaaacatacctatagcatggtctctgtcataaaaaagaactatatattttgttttttaaaaatacatgtaagtttataaaggcacacaaaaagatatagacagatatacaaattatggtggctcccctttggggagggaaaggaaggggactaagggaagctctatatacttctgtattgctgaaaaattgtactgtgacaaaaacatatttgtgtattatttgtacactttaaaagatcatctttaaaatggacttctgaccaaagtccaggtctcagatttctattttcctcacaacaccaagcctgttctagcccgctccaggtctagaatgctgcagcactaggctcgcattgccactcccatacccggcaggacgtggcagggtcaccaccctttggctcagcccagaccaggcattgcaattcttctcacagagcccttgatatgaaaactatttgccatgctgccttaagctagtggttggatttcaggcatgagctggcaaatagaaaaggcagggaggtgcttttcagaacctttgagatcaaacagccagggtgctgagcaccttattgcagggaggaccatgcccaatgtaaggacctggctcaagggagactggagtttctaggggtctctgggatatgtggggcagtggggacagtgcagagaccttttcacagagccaaggagataacccagcacccagagagcagacgaatccacgggctctgtgtgggagtgagggaggccttcccggctttcacatccaggtgcacctgagccccgatcccccatgagtctgtctcaggaagtaaatggcaaaagcgctaagtagatagccccagaggaggaggagaattctgaattctgtttatagctctgctcctattttgttttctaacctcagaaaactgatttatccttgggaagggtcagtttcttcattaggacaatgaagaaaaatccagctgtcccttccaaggggaggtatcatgagcagtatcaaggtaagcaagggaacctggtttggaatcctggttgacaccggctttcactttaagaagtcgcaagagactgccgcaagagaggaagccacagaccaggttggaccctgagcctggagtactgccttttctcttctttgcctgctaaactccttgcttgtcaagattcagcagagatgacaccttctctgggaaggcttcctgagtctcctgcagtgagcccctaggctcccctagcccttggctcttatgtcttatctctgagaaatctgagatctgcacttttgttagaagtccgttttaaagacaatcttttaaagtgtacaaatagaaaccttatcttattgtattgcaggcctatctcctcccccggtgtgtatcaatgctcaggctgggcctttgtctgctggcttgtggagggaggcaggacaagccagtgaccacattcctgcactctgggctgcctcctgtggggcccgtgaggaagcggcagccttccctgccgcgtgcagggcctgggttgtgtgggtggctctcccgagtctcctccagccctttttgggtctgattctctgaccctcctctctctccttgctcaccacttggcactccactccttatccttttgctgcattaagtttggaaagagattttggagaaaatatagcccatcaacgaatttctcctcctcccagggcctgtctaggcgtgtgccatgcccaccctcttcctttccagcgctggccacatcctccctgcaccttcagtgcctgctttccctgcctcttcctgggctccgggtctgtgtccacagtgtcctgcgtggccctcgcgctgcctctggttgcccacattcctgcaactctgtgaccacagcaggggcgattacacattcctggcctggcagccaacagtgtaaaaaagaacagaatgtcctagggccccgcctagcccccagcttcacctgggcccctcccgggtctggacaaggttggagggggtggcgaggaatcagcaggaaagaggagggaccaggaggaggcagacgcatcccacctgagtgcgctgctcccacttagtgagcggggaggagacctgcagagacctcttctctcttctctgcagggcctgagggtgaggctgacctgtgggtgcccttggagggctgcccacttgctgagcctctagctcctggaagcacacttgggactccccccttgctctccttcctggagacagactccctttggtgctggctccttctatttgcccccaccactgccccccacctgcctctactcactcagtgcccctcctccatccctatctctctgtccttcgctgtccctctctattgtctccctctttctgccctcctgtcctcccggttccccacccaggccctctcagcctggctggccccttctccttgtgttgccctcctagctgtgggctcaggatccttctacttgttcagatctttgcccctcacctgccatcctgtcccccagcctccttgcctgtctgcgtctaaagcccctgcccagagtccgccttctcaggtccagtactcccagttcacctgccctcgggagccctccttccttcggaaaactcccggctctgactcctcctcagcccctccccccgccctgctcacctttaattgagatgctaatgagattcctgtcgcttccatccctggccggccagcgggcgggctccccagccaggccgctgcacctgtcaggtgagggggaggagaggtttggctgccagattcaactggaaaggaaccagtcccagtccagccgcaacctgggagtgggaagctggaggcagcccagacctcctggagccctgcagtcctggggcagagacagaatcaggacacagctcgaggtcagggccagaggctggagctgagggcctagagtgagagggggcaaggcaagggggggagaggaagagaggcaggattagagagaggaggcaggccagaaagaggagagcaggagagacccaaagagaaacagaaggcagatagagagggagtgagaggcaggagctgagacacagatcctggaggaagaagaccaaaggaagggggcagagacagaaagggaggtgctaggacaaaactcgaaaggtggccctatcagggaagcagaggagaggccgttctagggaagcccagctccggcacttttggccccaactcccgcaggtctgctggctccaggaaaggtggaggagggagggaggagtgggagaatgtgggcgcagggtgggacatgggcatggccaggggcagcctcactcgggttccaggggtgatgggagagggcactcagggcccagagctcagccttgaccctgacccttgctctccccaatccactccggggctcatgaaggggaacaagctggaggagcaggaccctagacctctgcagcccataccaggtctcatggaggggaacaagctggaggagcaggactctagccctccacagtccactccagggctcatgaaggggaacaagcgtgaggagcaggggctgggccccgaacctgcggcgccccagcagcccacggcggaggaggaggccctgatcgagttccaccgctcctaccgagagctcttcgagttcttctgcaacaacaccaccatccacggcgccatccgcctggtgtgctcccagcacaaccgcatgaagacggccttctgggcagtgctgtggctctgcacctttggcatgatgtactggcaattcggcctgcttttcggagagtacttcagctaccccgtcagcctcaacatcaacctcaactcggacaagctcgtcttccccgcagtgaccatctgcaccctcaatccctacaggtcggttagtccctctgccccttccctggtgcctgcgcctggaagggtggtccagggtgctgaggtgctcactgggcaggcagagcctcagacctgagggtgggaactgacacccctgtcccaggtagagctcactgctggcaaaatgaggagcctccagcttactggactggcgtccctgcccagtggagccatcctagcaccccaggctcacccagagtgtggttgttggagcagcattgccctcccctgccctctcttctccttccctcccattcccttctccctcctgcaagtgggagggagtgcttgcaaaagggcaggggtgtgctcagctgcatcccttttctggagcaagatgccagcaaagtataagacctcgtccacctcagcaggagagtctgatggaggggtgaggctaggtgaggggaggcgagaccgtgcaggtgctgtggaggtggtgctgtcagtctttgtttagaaggggaatttattatggagaaagcaaagagggggatcgtggaggttagggctgcaagtgagcccaaaggctgggggcaggggccttacagaacaaggagaatgggtcaggctagagagcagctccttgtgaagctcttcccccaaaagacccaggctaaaatgctgcactgttgacctgcccaggtgcctgacctttacgtgcttgggtgtgtcctgaacttttgggtttcatcggtgctctttgccaatgttgggtctggaaaccggagcaggtggtaagcgtggagaagagaggagggcagggctgagtgcttttgtataccttttatttgtattcactcagccatgccacaccttgggaacacctgcttcaagccagacacagggctaggcacctggcaaaatggattcatgaataattcataagccctttattgaaggccaggtagtttgctgtgttgtggagacagataaaataagatagcagagacaggcatataagccagtaactgtggcacactgggataagtatgataaaaatggtgagttagtgtaccttcaaggagtgcaaaatctttatgggtgtgggtgtgagtgtgtgtgtgcacatattggtatgtgtgcgattttggatgctggggattggtcatgctgtgggtggaggccccttcgtatattccatcatgtccaaaggtgcgttacggactaagaaagggtgggacgtcctgtcctggagagagagagaaaaaaaaaagccaggtcatttcgttgattaacgtctgtataatgtcccaggtagggaccatttccttaggaagctgccgtgtgcacagacgctgcgaaggtgtcttgggtatctcatttcattctcacatcttacaagcccggtgctattgttatccctattttacacttgaggaaactaaggcaaagagaggcaagtcacaacatcacagagagagtgactgagctgtgactcatcctgtttacgcctaatcccaaaactctgcctctttttaatacccaagatgtggggctttgagtgaatgaaacttccagtcagatgtggcttccgcctcatttcagagctctcttgggtccttcctcttagcctcatttttctccccctgctgcctgcagacatcttcacccctttaggccttggtggaggggagggacccagcaggaaggggaaggacagcaggcggggcagtgggcactcaataaatatttgtggttgaaaatatgtcagtgagagatggaaagggagggcaggggtgaatcgggtgaggcctgcacagttcttaggttctgctggatgcggggccctagacagtccaggaaaaagccggggaaaggaagccataagccctgcctctggggcctgcaggctgggaggcagccatctgcccagaaagaatccctccttcttgaagggctgctgtgggagtcgggagggagagaacacctaggagaggagaggagtcggggaagggctccccagcacagcgggaggagatgcaacacccaccaagcactacacacttgaccttgtagtcacattatgtgctacaccctaaagctgggtgctttatagacactctctcatttaatactgacaagtccagggaggtgggcagtattattcccatttttttagatgaggaaattaaggcttggcaagaggaaataatttgagcaagggaacatacattatttatttattaaattaaaaaataaccgctgggcatggtgcctcacgcctgtaatcccagcactttgggaggccaaggcaggcattgagggatctgggatggagctcaaacaaggttgtttaaaagagcccctcacttgaggccaggagttcgagaccagcctggccatcatggtgaaacccccgtctctactaaaaatacaaaaatcagccaggtgtggtggcgcacgcctgtagtcccagctacttgggaggctgaggcaggagaatcacctcaggaggccgaggctgcagtgagccgagatcacgccactgcattccagcctgagccacagagtgagacacagtctcaaaggaaaaaaaaacaataataatgtttgtatatatttatgggccagactttttacaaatgaatctaaatcaaatgattctgctttaaattatttaattctcacaacacaccttggaagtaggtctcatgatgactcttattttatggatgaggaaactgagtcccagagagttaagtaactgcctcaacttcagacagacaacaagtggtgaaactgggactcaaaaatcatcccccgccccccgccccacccccacccccaccgtccaccctcacccccaccccccgcccccccgccacgctccaatggaaagccagggcatctcaggttagcagctgagtcacaaacctagtgtgtttgatttcaaagctcttttacccattacactttaagtagggatcaggcaaagacctcccagggtcgggggcagctggtgggagcccagcgggcagagcagcagtcattggaggacaatttgtcaggcgtgcaggagggagggatccagggccactcctactcaggagagtggcagggaggtaaacaggttaatgagcccctgtgagtgaatcaccgggagcgcagtgaatgactcctaccgaggagatcggttgatgagctagaggaactggagtgaggcagagctgcccagggctgcctacctgctgagggtcgccaccagcagagggagaggaggaaagtggacatgcaggactctgtgctgctttctaacttcaaggaaaggggacaaagcactgaagacctttcagactaagcaaggaagtgctgagtccgaagggaagggttggccactgcagcccctttctctctggtcaacaaagggcttcttcactgaaaggagagggccagtcatacctacagtcatggaaaacagagcccacagacatatttttcatccagtcccaggaacggtttaggctggacccaagaacttggggttcttgaacaatgaaggaggtcatggtagcttctttcctggaaatggcacagcaggaggccaggagtgggtgaagcaaggggcagtttcccagagagagctcctgtggggaggatgggaaagccctgagctagggaggccgtccctgcctgtggtccccagacgtggcgggcagaccctgcattccctgggcagtctggacaccaggctgtgctcagcagggctggcaggaaaaaaagcctggactgttgagagttgacatccctctaaccctgccatggtggttggatccttctcatcccaggtgggatggggcctaggcggctcccacggctgttaggatgagcatgggctcttctgtgagaggaggccaccggggtaagagggagggaagaggaggagagagcagagtgtcagcctccaagtctcccagggtccttgcaccctgctgctccgtcctggacacggaagaggggctagaggggagagggccagctgcagggaaaggagattttgctgcctgatcccagatgcttcagagctgggaggcagacacagtggaaaaagcaggggccgtggagtgaacaggcctgggttcacatcttggctccagtccttcctggctgagtgaccctggggaatttgcctagttgataggcctcagtttcctcaactgtaaaatggggataataatgcctgcccgatggaattgtgtaagggttgactcaccctccaatgtagggctgcctgccagagcagatgggagtgagggcagtgagcatgacctgaggaggaggtcaaggccagaagggctggactgtctggaagaacccactgtgggcattctttatcccttccctccagccgctggtctcctcaaaacaagatcggatgtcttcaatgtgctttctgtttagtggtcaattctcttagctctaggtgtcaactcaaaggctctgcctcctgctataggaatttctagtatcacggggtcatggagggagagattttttttttttttttttttttgagacagagtcttgcactgttgcccaggctggagtgcagtggtgggatcttggctcactgcaagctccgcctcccgggttcatgccattctcctgcctcagcctccagagtagctgggactacaggcgcccaccaccatgcccggctaatttatcatacttttttagtagagacggggtttcgccgtgttagccaggatggtctcaatctcctgacctcgtgatccaccatcctcggcctcccaaagtgctgggattataggcgtgagccaccgcgcccggccattccgtcttatcttatgccaaaaaagaggagcagtagaccttttgggagagtgaaggtggggccctatggaacccagcctcctctggaggccttgtcacaggtttgtgtgtgtgggatcaagggctgggagcccaggctgtgctcagtgggggggctcatcagtgaggccaggcaggagggaggcgcgtagggtggcaggagggaggtgcgtagggtggcaggagggaggtgcgtagggtggcaggagggaggtgagtagggtggcaggagggaggcgtgtagggtggcagcatggaggaggaagccgggcacagagatggcatgggggctccccaggggagaggagtgtggccagagaagtgacaaccagattgaagttggtgatgagagagagggaggggcaggaggcagaagggacttgagccagcctggggaaggagtggaaagggaggcccagccaggatgtggtggaaataactccaggcaagtgggggatctggattcttcctgtgtgaccttgagaaaggcaaattcgctttcctgggctcctggctcctctgtgtcttcctgatagtcgatggtctcttcactttgtgtcactgagtattttctcacttaaccccccaagagcttcatgcggtaggcagatctagtgttatgcccattttacagataaggaactcagactgagagtcagaaaggctgggtcacttaccccgagttacacagacagaaagtgtgtggctggaacaccaggccctacatctcagagaggttctggcttgggtgctctttctggggcaccatgtggccctcctaaaatagccagaggtagcagggacggaccagagggcagtgtggtggttggagtgctgtctgacccatttgctagctgtgccaactggaataagtcatcatgcctcaggtttttcacctggaaaagggaatgacaattgtgttagctaacagtggctaacggtatactgtgttacactgaagattaaatcatgttaaataagttttagcctaaagttgcctctttacatttttaaagtttgtcctaaaggtttcttcatgcatagtgaactgccacctaactagatatgtaaacacactataacctacctttatagcaatcacagagttttggccaatgaaaggcagcccacttgtcaaaccttgtccaaataaggcaaacgccgggggtgtaaccaatccgggtgtttctgtaccttacttccgttttctgtgggtcactttccttttcctgtccacgaatattatcgaatcatgcagcagcccccagagtcactgtgaatctattctggttgggggcggggggcactcgattcgaggttcattgtttgctcagtgaaactcaagttaaatttaatttgtttaaagtttttcttttaacaattaaataatgtacattctaataccacagtgcctggctcataataagtgctcgataaacgctagctatgcttgccattcttttaattataaataacgagcaagtctcttagaatgccaaacacaccttcaaccagagctacattttctcctgtgagaagttcaggggctgccagagctgatgcctaaggcccagccagctagacttttctggtagagatggaaatagagctgaatggaagaggaagtgaagatctggactagacggtggttaatgtagctgcacgttaggaccacgtgggggctctttcaaacaaccttgttctggctccagcccagacccattaaatctgaatctggcaagtaagaccctgcactggtatttttttctttaagtgaggcataattgatgtacaataaaatgaacaaatcttgagtgcccactcaggtttgacagtcgagatgttgaacactcccattacccggtgccccctttccatcaattcctcttcctctcccactgtcattttctgaatgctatctctatcaactggttttgtctgttcatagaattcgtataaatgggatcatacagtatgtattttcttgtatgtgtgtctgacttattttgcttaatgtttctggaattcttccctgtgttttttgcacgtatcagttcctttttattgctgagtggttttgatgagcctattctggttgaggggctgcctgatttgagcatcgttctttgctcaagtcaactctgttaaatttaattttgcctaacgttcttcttttaacaattaaataatgcacattctaataccatagttcctggctcatagtaagtgctcaataaatgctagctatgattgccattcttttttatttttttaagacagggtcttgctctgttgcccaggctggagtgtagtcacacgatcacggctcactgtagcctcaaactcccaggatcaggcaattcttctgcctcagtcttctgagtagctgggactacaggtgtgcaccaccacatctggctaatttttgtattttttgtagatacaaggtttcgtcgtgttgcccaggctggtctcaaacttctgagctcaagtgatccacccacttggccttccaaaattctggaattacaggtgtgagccaccatgccccgcagattaccattcttttaattagcagtaatgagcaagttttctagaatgccaaacacacaccttcaacacacctttgagttgcttcaggctttttggctattataaataaaatggctatgaacattcatgtacaaatctttttcttttttttttttttgagatggagtttcgctctggttgcccaggctggagtgcaatggcgagatcttggctccctgcaacctccgcctcccgggttcaagcgattctcctgcctcagcctcccgagtagctgggattacaggcatgtgccaccacgcccggctaattttgcatttttagtagagacagggtttctccatgttggtcagtctggtctcgaactcttgacctcaggtgatccacccaccttgccctcccaaagtgccgggattacaggtgtgagccactgcacccagcctcatgtacaaatctttatgttctaatgtgtttcgggtgcggcctaaacaccgtaaattaaacacagctcactgtaaatccctacattccttcttaatatgttcatcaattgatggacatttgggttatttctactttttggctattagaaataatactggtatgaacatttgtgcacatttgtgtgtgtatgttgtgggggcatatgctttcatttctcttaggagtggaatggatgggttatatggtaactctatatctaactttttgaggaacttccagattgttttccaaaatgatcgtatcattttatattctcactagctgtgtacagggtcagaatcttttaaaaatgtaggtctgttcggctgggcgtggtggctcacgactgtaatcccaacacattgggaggccgagacgggcggatcacgaagtcaggagatcgagaccatcctggctaacatggtgaaaccccgtctctactaaaaatacaaaaaattagccgggcgtggtggcacgcacctgtagtcccagctactagggaggctgaggcaggagaatggcgtgaacccggaggcggagcttgtgagccgagatcacggcactgcactccagcctgggcaattgagactccgtctcaaaaaaaaaaatgtaggtctgttcataaagtgcctactacatacggttgttctagggattatttgttagatatttttcttacaagagaattttgcctaccccaaggtcaggaagatatcttccatcttctagagtgtttatggttctgaatttcatgtttacgttatgatccatcttgaattaatttttgcctgtatagcataaggtagagattgagggtcattttttttccaatacagtattcagttgttctagcagaacctgctaacaaattttattttctacactgaattgaattggtgttttggccaaaaatcagttgaccatctatgcatgagtttatttctggactctattctattccattgatctattgtctctccttaccaagaaccgcattgttttgattactgtggctttatagtaaatactaaagtcaggaggaatacattttccaacttggctcttcttttctaaaattttctagctattctagattgtttgcatttccagataagtcttagaagcagtatgtcaatttctttaaaaatacctgctggggccgggtgcagtgagtggctcacgcctgcaatcccagcactttaggaggctgaggctggtgattgcttgggctcaggagttggagtccagcctgggcaacgtggtgaaaccccctctctacaaaaaatataaaaattagcttggtgtggtggcacacttttggtcccagctactagggaggctgaggcgggaggattgcttgagcccaggaggaggctgcagtgagcggcgattgtgtcactgcaccccagcttgggtgacagagcaagatcctgtccaaaaaaaaaaaaaaagctggaattttgatagggattgtgttgaatccatatatatatatatctccacttattctgatctttgatttatttcagcagggatttcaatatatttttcagtcttgcacatcttttgttacatttatttctatgtatttgatgttgtttatgttatttaatattgctgttgtatttctggttttccaattttctgttgccagcatgtagaaatgcaattaatttctttttgagacggaaatgcaattaatttttttttttttttgagacggagtctcgctctgtctcccaggctggagtgtagtggcgcgatctcggctcactgcaagctctgtctcccgggttcacaccattctcctgcctcagcctcccgagtagctgggactacaggcgcccgccaccaagcccggctaattttttgtattttttttttttagtaaagacggggtttcaccgtgttagccagggtggtctcgataccctgaccccgtgatctgcccacctcggcctcccaaaatgctgggattacaggcgtgagccaccacacccggcctaaatgcaattaattttttttgtgtatttgttgtgtaccctgcaaccttgttcagtttgttagttctatatttgttttgttttggtagatgacatccctcaggccctgctactctggactttcatgatggagatggtaataggaattgtattaagaaggaatgtagggatttacagtgagctgtgtttaatttacggtgtttaggccgcacccgaaacacattagaacagtctttggaggagggaggcggggtgggtggggcatcctgtatttttagagttggagattctaaaagttcagttgtgaactcttgatttcggtgccaagcggcactcaagccgaaaggccaccgacactcgcctgcggggatcagggcgggatgacctgggtaccgcggtcacgccaaggccgaggccctcacccttcccctctttgggaaagggcagacaagttccgggttcccttctaggtccgggcgagggggagagcgccccacagacgacaggcgcctcctgcctctctccttcaataaacagtccacagtgtcccggctgggctcgccgtggcctccgccttcccggcggacacacctgtttacccttcaccgccggacggccaggaggcgccacgacgaccccagccccgcccaggcttctccgggatggaccggcctcccggggcacagatgaggaccctgaccccggaggggccagacactcgctccagggcccctggcctgaccctcttcccctcgccccttcaggtacccggaaattaaagaggagctggaggagctggaccgcatcacagagcagacgctctttgacctgtacaaatacagctccttcaccactctcgtggccggctcccgcagccgtcgcgacctgcgggggactctgccgcaccccttgcagcgcctgagggtcccgcccccgcctcacggggcccgtcgagcccgtagcgtggcctccagcttgcgggacaacaacccccaggtggactggaaggactggaagatcggcttccagctggtgaggcccgcagcgccgaggggcccgccccgcccctcgccggcccctggccccgcccacccatgggctccgctcctttcctgacccgcccgcgcagcccagtgacaccacgcggggcctcgtgggctcgcgggcaaaaaaaaaagtaaataaatacaaataataactagataattaaaataacacctcttggtgcccaagcttttggggcctcctccctggggtcctatgtagaagcatttcaggggtaggaagtcaaatttattatggaaaatgaacttttattattattattattattattgttttactgtttctggtccttgattcaggaaggaaaatgcaactttctgaattccagtgcccactagtgggactcagttaggaccctccagcgtgatggagaactgggctaacagcccaagatagagaataaggagacagtaaaaaaaggaaacttagctgggggcggtggctcatgcctgtaatcccagcactttgggaggcctaggcgtgcagatcacctgagcccaggagttttagaccagcctggtcaacatagtgaaaccccatctctacaaaaaaaaaatacaaaaattagcccatgtggtggcacaagcctgtagttccagctacttaggaggctgagatgggagaattgcttgaactcgggagatggagactgctgtgagccttgatcacaccactgtactccagcctgagtgacagagtgagctcgtctgccaaaaaaaaagaaagaaaggagcaagggaaaatgagggaggagccaaggaaaggagacagggaagttcccattagtaagagtgggctggggactggagtcctagtcccagctcttgctgggacaaatctcttgatccctcagtcttcccatcagtgaaatgggagggaaagtcttgctccttccaccctaggcaggggaggtataaatgaaccaaaaccgtgtgtgtgcagctactggtctcctttcctggcctgcaactcccttaatcccatgctcccctggtccatgctcctagggacttctgcttctcttccacttctgtctttccccactcctggcttccgactcctgtccgtcagtcctcagaaccccagatcactcattctttgcccttggccctgccaaggggcttatccccggctgcgtgtcccctctgactctagtctctgtgtccagtgcaaccagaacaaatcggactgcttctaccagacatactcatcaggggtggatgcggtgagggagtggtaccgcttccactacatcaacatcctgtcgaggctgccagagactctgccatccctggaggaggacacgctgggcaacttcatcttcgcctgccgcttcaaccaggtctcctgcaaccaggcgtgagtcagtcctgcctggctccttgctctccgcggggtccgcttccctgggtcagcctcacgccctgcatgggcagggcccaggaaatgcttgttgactaaaaaaatgccagtgccagcaggccagggggaagcactggctttgggcccacaccctgccccagagagcgccctacgaactcctgctgctccctgcactgctggatctgagggaagtggcctcacaggatgccttgggaagactggggctttgagaaaccaaaggctggaagcatggatcttggtcttttttgtttttcttttttttgagatggagttttgctcttgttgctcaggctggagtgcaatggcgcgatctcggctgtctgcaaccttcacctcctggggtcaagcaattctcctgcctcagcctcctgagtagctgggattacagtcatgcgccaccacgcctggctaatttttttatttttagtagagacgttggtcaacgtccatgttggtcaggctggtctccaactcctgacctcaggtgatctgcctgccttggcctcccaaagtgctgggattacaggcgtgagccaccatgcctggccagggtcttggtctttctaaggcccctttctccctagcatcaaagctcaaaagggcctaggagatcatctgtctcatactctgttccctgagctgaggctggcagtagtagtgaggtggagtggcatgggttgagggactaaacctaagttcccactctagctctgtcacttcctggccaggtgactctggatgtatcacatcatccttcagagcctatttcttagattgtaaaatggaagtaaaacaaaaaatgagattcattcagtgttcgttcaacaaatagttttgactatctgggctatgtgccagtcactgttctaggcatttggactacatcaaaggaaaaactatataatccatgctcctttggcacttttactcaagtgacgaagatgatgacgataacactcatctcaagagctgtaccaagtgtgtgagatacaaacgtgagggcactttatagaccacagtaaatgatgggtttcattactcttgtactcaaacaggtgaagtgacttgcccttgggaatgggccggccctggctaaggattcttcccaccccactacccctcgggtattcattctgtgaggacccctgttataatgtccttgcaagcagctcatagcagctgcaggttctctgagggctgggagaggctgaggcgaggggggggtccccttctgtaacctctggccccctcctcccctgccttctcctcctgctcgtttattttccggagccatctccctgcctctgcctggctccactctacagggggcattccctcccctgttgctgaagaatggccacagggcaaggtgtcacttcttacccttcacacacactctgcccagtacacgattttgttctgtttttagtctttgcatttgtttgaggacagaaactaccagctgggaagtaagatggtagcaacacctaagcctgagtccgcccacacctgtcaccaagttcctctaactgtcacctggacacctgtgctttccctatgccctcacccgatgcctccctttgctctgtgtgcctgcctccccatcaacagaaagtccatggacacctgtgctttccctatgccctcacccgatgccctccctttgctctgtgtgcctgcctccccctcaacagaaagtccatggttcatctttatcttggcacttaggcgcttaggtcagctcagagcctcattgctcgcctgggttgttatacccaccactccaccctactgcgttcttttgcctccaaatcctcccttccttctgcaactacaggaacctttgtacttcaaccttacttcacgtcaccacatgtaactattccagttagtcctgtgtgttagtccattttgtgttgctataaaggaatatctcaccgggcacggtggctcatgcctgtaatcccagcactttgggagaccgagatgggcggatcacctgaggtcaggagttagagatcagcctggccaacatggcgaaaccccatctctactggaaatataaaaattagccgggtgtggtggcacacatctgtggccccagctactcaggaggctgaggcaggaggattgcttgaacccaagaggtggaggttgcagtgagccgagatcgcaccactgcactccagcctgggcgacagagcaagactccatctgaaaaaaaaaaaaaaaaaaaaaaaaggaatatctgagtctgggtaatttataaaggaaagaggtttaattggctcagggttctgcagattgtacaagcatggcaccagcatctgctcagcttctggggaggcctcaggaaacttttactcatggtagaaggggaggagagggggcaagagagagagagaccaggcacttttaaacaaccagctatcgggtgaactaattaatagtgtgaggattcactcattactgtgaggagggcaccaagccattcaagagggacccacccctgtgacccaaacacctcccagctaggatcacctccaacatgggggatcacatttcaacatgagacttggaggggacaaacatccaaactgtatcctcctgtttaaaatcgttcagtgtctctcacggcctccagcatcaagttggtactccttagcatggctttctcacccctttcctccccgataactacacccttttcccccaccctataatctttttttaataacacttttattgagatataatttacaaaccataaatgtattcttttaatatgtataatttagtgatttttaatatatttggagttgtgtaaccattaccactacctgtttttagaatattttccttaccccaaaaagaaaccctgtacccattagcagttcttccccattttctcccctcctccaagccctgagagccactcttctgctttctgtctctatggattgcctgtggtggacatttcacataagtggaatcatacaatatgtggtcttttgtgagtggcctctttcatttagcataacgttttcaaagcttatccatgttgtagcatggatcagaacttcatttttatggctgaatactatgatattgtgtagatacaccaccttttttttttttttttttttgagacaggttctcactctgttacccaggctggagtacagtggcacaatcagacctcactgtagctttgatttcctgggctgaaacgatcctcctgattcagcctcccaagtagctgggactacaggctcatgccaccatgcccagctaattttttttaattttagtagagactaggtctcactatggtgcccaggctgatctcgaactcctgagctcaagccatcctcctgcctcggcctcccaaagtgctgggattataggtgtaagccaccacgcccggcccacatttttgcttatccattctcagttgatggacatttggattgtttctactttttggctgttatgattaatgctgctatgaacattcctgtacatgtttttgtggatcctgtacatggatctatgtttttatttctcttgggtgtttacctatgagtggaactgctgggtcatgtggtaactctatatttaacattttgaggagctaccagacttttccaaatggtcacaccatttaacattcccaacagcaatgtatgaaggttctaaattctctacctcctcctcatgctgttgtctgtctttttgactttagccatcttaatgaatccctgtaatcgtactagtgagctaatacagctcttactaaggctagacaccattctaagcataatttcatgctcaacacccctgtgaggttgatatttttattatccccattttacagctgaggaaactgaggtacagagagattaagtaagtaacttgtttggtcccacatctaatacttgttagagccccaggattcaaatacaaggaatttaattctggagtctgtgctctttttttttcttttggagacggagtttcactcttactggccaggctggagtgcaatggcgcaatctcagctcatgacaacctccacctcccaggttcaagtgattctcctgcctcagcttcctgagtagctgggattacaggcatgtgccgccgtgcccggctaattttgtatttttagtagagatggggtttcaccatgttggccaggctggtctcaaactcctgacctcaggtgaccccacccgcctcggcctcccaaagtgctgggattacaggcgtcagccactgcgcctggctgagtctgtgctcttaaccatcacattatactgattctcataggccactatagtaatgtgcttagtgtgtatctctatgtgtttttgcaaaatctgtatttaatttatataaatggtattgtgttatagatctcatttcacctcttactatttttttttttgagacagagtctcgctgtagtgtgcagtggtgcaatctcagctcactgcaacctcccaagttcaagcgattcttctgcctcagcctcccgactagctgagataataggtgcccaccaccacgcctggcgaatttttgtatttttggtagagacggggtttcaccatgttggccaggctggtctcaaacttctgacttcaactgatccacctgtctcagcctcccaaagtgttgggattacaggcgtgagccactgtgccccaccacttttttttttcgaagctctatgttttaaaacccatccgtgtttctccaccgctgatggaacttgtgcctgctttccatgggggcagcacccaccattatacttgtcccctctctgtgtgcgaagggctcaccagccttcaggactggccacctctgtagcctctccttcagtccttccctgcatctagcctgggctctagaagtgctgacttcccagtacatcctagaatgtgcaccagtatgtcacgcctctgtgcctttgttcttcaaggccagtggaatatcccggatcacctagttccaatctcctcattttacagaatcatcctacattttacagaggaggagaataagcttagaaacaatgacctgcttgagaccgtacaaccagaaccccaccctttatctctggccagcctcttctccctcttctctttagtcctcctctgctgctcactggccgaagtcccctttccgtctttgcctggctcccgtcgctagctccaagatggcagggtagcagaacacagatcctctctgtgccgtgtggcacatgtgctgtgctacaacccacacagcctccctgttctggaacctgtgatttgctgtgaaattgcagtcctactgcagctgtgttgcctctgtgattgctttctctctgtccccacacctgtcacagatgagttttggacctaccattctgagacatactgatgcaagaggctcccaggaaacacttggtactgatcttcctcccctcagctccgtgctcaccactggtcacactttctcctttaaccctgctcccctcctccccttcattcattcattcattcattcattcattcattcctcactcaacaactatttattaatcatctcctctatctcctagatgacaggatctatgcaactaacccagagatgacacagagatgaatgagatgtggctcctgtcatcaaggagctcatgattcaatggggaactaacacttagatgcatgggcagttagggacatgcaagaatctttgtaatgcaacaagagagaagttacaaggcagcacggaagtcaatgccggtgaacccagatggcctggtgagaggagcctggactagaaggtagatgtgtgaccttgggccagctgtttgagctctctgagccttagcttcctcctctgtgatatgaggatgagactctcacaggctgttggttggagtgactgagggagtgtgagtaaagctctcagcattgtgccagcacatagtaggtgatcaggaaacaaatggctctgaaaggcacaagtcctgtaggagtttaagagagtggacatttctctctgcctcatctccctattccctgcaccacctacactttcctctctgaccctactctctctttcctgataaggaattactctcacttccaccacccgatgtatggaaactgctatactttcaatgacaagaacaactccaacctctggatgtcttccatgcctggaatcaacaacggtgagaagctccctgcttgctccatggcgccctctgcttcagccactcacctgtacttaccttgagctcacctcctagagctgctgggaggggtcctgcctgctgtctctccccaataggtgccacatagtccgttccaggcatgagaggaatcccgtcccaggtcttcctcctgcctccagattccagctcaggggttgccaggtccctttgcgggtcttcctgaacttgcttctcttgcagctttagagactgggcaaggaagggagagtggatttccatctcctaactcttttctaggattcccgcctctgccaactctgctctctctgcacccctaggtctgtccctgatgctgcgcgcagagcagaatgacttcattcccctgctgtccacagtgactggggcccgggtaatggtgcacgggcaggatgaacctgcctttatggatgatggtggctttaacttgcggcctggcgtggagacctccatcagcatgaggaaggcaaggatgctgactgggaggcctggaaggagcgcctcagattgcagaggggcagcggggaggcatgggaggctggagagggagagcatgtggggtgggccttgagcatgtggaggtcttcaggagcaggaatgaggggcagaggggctggcactgggaagtaaagccctgcagggtggaccctgggggacaagtgctgagaaggcattcaaggcatgcttagggtttctggggatgctctgggcctagtggccttgaaatgagcagtgggtgggcatgggggtggctggaagcatgtattgagagggcgaggccagtaggaggggctggcaggtgtgagatacaacctggaactgagggaaggcagagaacccagaggcacttgctctgtcctctgatctcttggtgtatgtgggttcataggaaaccctggacagacttgggggcgattatggcgactgcaccaagaatggcagtgatgttcctgttgagaacctttacccttcaaagtacacacagcaggtgaggcccaacctgattccgtggcagccactcccagccactgccctggctggccctgcaaagctggaggggttgtgtatgtgagagagagagagggaaactggggggtggtggaaagaggatggaggctctgtgcagagaactgctgagttcaggcctgaaccccctctcctctccaccctcctcccttccaggtgtgtattcactcctgcttccaggagagcatgatcaaggagtgtggctgtgcctacatcttctatccgcggccccagaacgtggagtactgtgactacagaaagcacagttcctggggtgagactccagggagcccccaccctgccccactgaccccagtactcactgaggcactttttcctctcagtcccctgtttgtggggatgacttctggctcccacctgctgggatgaatccttccttgctcttgtttttcagcctttagtctctgcctctgtcagtttccctctccctcagtctctctctctttttttctatttttttgaaatggagtctcgctctgtcacccaggctggagagcagtggcgcgatctcggctcactgcaagctccacctcccgggttcccaccattctcctgcctcagcctcctgaatagctgggactacaggcacccgccaccacgcccagctaattttttggtatttttagtagagacggggtttcaccctgttagccaggatggtctcaatctcctgacctcatgatccacccgcctcggcctccctctctcttctatctctgttcctccctctcagtgttgcagtctctctgttttggcctttgtgtgtttgtcaaggaattgtcccatttaaaaacaacctgcaggccgggcgcggtggctcacgcctgtaatcccagcactttgggaggccacggcgggcggatcacgaggtcaggagatggagaccatcctggctaacacggtgaaaccccgtctctactaaaaatacaaaaaattagccgggcgaggtggcgggcgcctgtagtcccagctacgtgggaggctgaggcaggagaatggtgtggacccgggaggcggagcctgcagtgagctgagatcacgccattgcactccagcctgggtgacagcgagactcggtctcaaaaaaaaataaataaataaaataaataaataaaaataaaaataaaaacaacctgcagcagaaggaaggaagagcacgtgagaaaacctccagcggttcctcaatggctcctaaggtttcagtgcatgctctgcccacagcttccctgctcagtgcccagggcgcttagctgggcaggctctggaggggctgggtggggtacacaacacttccctggggagcaggaagaaaatattagaagatacatgggtctgtctcattccttcacattttccatcttatgtgctttagaatggacatactgtatccattcaatagtagaggtatataatttataaatcaaatacatgtattggacctgtttaagattttttttttaactgaacaagggcacaatcagtaaagtttggagcaccttggaatctcctccttatcctggtataggactagacaaatctctttccttttgactacagttgagttgtttggcagggaagtcgtgtgccaggaagctgagagagaaagaaaatcacaaaaagaaaatatgtaagctgcaagggtttgcattcctggagttcatgctcttccctggcacagctggcctgttccccctgcagttcctcctcccagggctctcccctgggcccagctgtcccacagggtgggcggagggccatcacgggaggggacatggtagtgggcactggagacacagaggccctcaaaggcagcggattgtctcaccccagagttcagcgtccatccctaccttgttcctgtctgtggtgacttttccacttctgtccttccctgggctggctccgcagttctcttctgcctggactttccagtcgtggcctcctggttcctgtctctctgaccttagaggattgtagcacatcagaactgggggaaacccaaaggccatctggcctcatctcctgtctcagatgagcaaattaaggtccagggggaggatgtgacacgtcccagggtatacagaactgggatggaggagatgccacctgtgatttctccctcccctcaaataattatttctactttgtgggtttgcacatctgtgagtgaaaaataacaatattgattgctgagaagttgtgaggatgagagaggaagtaaggctaaaagcacagtctgttgcatttcctagggcttacttccccggagaagagggccagctgcttccccttcttcctaaagatctccagccctggtagggatttgggtcagaaatgaagaaggacttcagactgaggaactaaaagtagcaataatgacaaaataaccttacttagaatttgggaaataggggaggaggtgaatctacagttccattattattattattattttggtaatagctttattgagataatttatatcccatacatttcactcatttaaagcatacagcttcattttagtcaaattttagttttaattttacgttttaagtatagtcccagagttgtgcaatcatcatataatcagttttggaatatttttagtgttcccaaaagaaaccctgtactcactcaagccaggcacagtggttcatgcctgtaatcgcagcactttgagaggccaaggtgggcagatcacttgagcccaggatttcgacaccagcctgggcaacgtggcgaaaccctgtctttacaaaaattagctgggcatggtggtgcacacctgcagacccagccacttgggaggctgagctgggagaatcacctgagcccaggaggtcaaggctgcagtgagccatgatcaggccactgcactccagcctgggcaatggagtgagaccctgtctcagataaataaataaataaaccttgtactcattagcaagtcccaagcttccctcccctcctccaccactgccagcccttgggcaaccacgattctttctttctctctctatggatttgcctattctgaatctttttttttttttttcttctggagacagaatctccctctgtcgcccagactggagtgcagtggcgcgatcttggctcactgctacctctgcctctcaggttcaagcaattctcctgtctcagcttcccgagtacctgggactacatacaggcgcatgctgccaagcccagctaatttttgtattttttagtagagatggggtttcaccatattggtcaggctggtctcaaactcctgacctcaggtgatccgcccacctcagcccccaagtgctgggattacaggcatgagccactgcgcccggctattctgaatctttcatatagatggaatcttagagtgtgtgaccctcgtgtctgccttatttcacttagcataatattttcaaggttcatccgtatggtagcaatagcagtgcctcattcctttatatggctgaataacaacactcccttgtatggatagaccacactttgtttacccatttatcagttagtggacatttgtgttgttgccactttttggttattgtgaataatgctgctgtgagcatttgtgtacaagtttttgtgtggacgcatgttttccattttcttgggtatatacctaggaatggaattgctaggtcatatggtaatctatgtttaaccttttttgaggagctgccaggctgttttccgaagtgacatcaccattgtacatccctagcagcagtataagaggttttcagtttctccacatcctgccagttcttgttattgtctttttaaatttttatttatttatttatttatttatttattatttattttgagaagactctcactctgttgcccaggctggagtgcagtggcacgatcttggcaaactacaacctccacctcctaggttcaagcaattatcctgcctcagcctcccaagtagctgggattacaggtgtgcaccaccacacccgactaatttttgtattttcagtagagactggatttcaccatgttggccaggctggtctcgaattcctgacctcaggtaatccacctgcctcagcctcccaaagtgttggtattacaggcgtgagccaccgcacccagcctattgtctttttttaaataacacacatcttaatgggtgtgaagtggtatcttattgtggcttaattcccttattcttatacaattattgttcccatttttcttttctttttttttttttttgagacggagtctcgctcagtcgcccaggctagagtgtgcaatggcgcgatctcggctcactgcaagctccgcctcccgggttcacgccattctcctgcctcagcctcccgagtagctgggactacaggcgcccgccaccacgcccggctaattttttgtatttttagtagagacggggtttcaccgtgttagccaggatggtctcgatctcttgacctcgtgatccacccgcctcggcctcccaaagtgctgggattacaggcgtgagccaccacgcccggcctgttcccatttttctttatggcgtttatgtttttgtccatagcatatatttccttacactggtgtatcctgttttgtttttcgcctgacttagcttattttctttctttattaatttattttttaggccaggtgcggtcgctcacacctgtaatcccagcactttgggaggccgaggcgggcagatcacgaggtcaggagatcgagaccatcttggctaacacagagaaaccccatctctactaaaaatacgaaaaattagccgggcgtggtggcgggcgcctgtagtcccagctactccggaggctgatgcaggagaatggtatgaacccgggaggcggagcttgcagtgagccaagattgcgccactgcactctagcgtgggcaacagagcgaaactccgtctaaaaaaaaaattaatttattaaaaatttttttttttagagacaaggtctcactctgttgccagagttggagtacaaaggcacactcatagctcacttgcaaccttgaactcctggcctcaaacgaccctcccacctcggcctcccaaagtgctgagccactgtccctggcttagcttaatttcttaaacgcttcttggtactgccactcataaggcatcattataatgctaaataatgctcttgtaaagtgggtacccagggatcttgggagacctcttgggtgtggggtagagaaagctgaggtgccctaggagaacaggcatctctctgtacccacagggtactgctactataagctccaggttgacttctcctcagaccacctgggctgtttcaccaagtgccggaagccatgcaggttagtgtccccttccccgggtacaggttgggtagaatacaggttaccgagccaagcatttgggagagctctgccccaacactgagcacctttctccatccccagcgtgaccagctaccagctctctgctggttactcacgatggccctcggtgacatcccaggtagagtgtggggaagggatgggtgggggatgtgtgtgcccatgtaatgctgtggccttctctgggtattatgtgtatgagtgtgtttgacacaaccctatccctgtaagcctgaagcatatgggagtgaccttgatgacacccccattctttcctaggaatgggtcttccagatgctatcgcgacagaacaattacaccgtcaacaacaagaggtcagtcctgccctggtcccagccacaagaagggaatctttgggagggaaaatagacctaagaagagggatcgatatggttgattagaggaaggtccaggaaattcatcctctaccatttcttcccaccctctgccccacacctaagaaatggagtggccaaagtcaacatcttcttcaaggagctgaactacaaaaccaattctgagtctccctctgtcacggtaggtcgtgcctggatggagcctgtgatgctctgggggtcttacttagcagggcggctgtcggggaaaaccaaaaggttgtctctgtgggccagaaggctctgagtctcaaaggcaggggaccaaagaagagggtcaagggagaggttgggagggttggaagaaggagctcggccggggcataaggtctctgggggtggtgggagggacaggcatgctagatgctggggtgaaggcgcttgacccatgcccccatttcagctgcccctaactgtgggccagttatcagttttctctgggtgacactggccaggagcagagacaaagagcccagggggctgctgagaggctgagaggactcgggggtcttcagggatgaagggagacagcttggtgaggagggaagggggctcctctgccagagtccatccagaaccctctgtcccatcgtcaatgtacctctcctctcacagatggtcaccctcctgtccaacctgggcagccagtggagcctgtggttcggctcctcggtgttgtctgtggtggagatggctgagctcgtctttgacctgctggtcatcatgttcctcatgctgctccgaaggttccgaagccgatactggtctccaggccgagggggcaggggtgctcaggaggtagcctccaccctggcatcctcccctccttcccacttctgcccccaccccatgtctctgtccttgtcccagccaggccctgctccctctccagccttgacagcccctccccctgcctatgccaccctgggcccccgcccatctccagggggctctgcaggggccagttcctccacctgtcctctgggggggccctgagagggaaggagaggtttctcacaccaaggcagatgctcctctggtgggagggtgctggccctggcaagattgaaggatgtgcagggcttcctctcagagccgcccaaactgccgttgatgtgtggaggggaagcaagatgggtaagggctcaggaagttgctccaagaacagtagctgatgaagctgcccagaagtgccttggctccagccctgtaccccttggtactgcctctgaacactctggtttccccacccaactgcggctaagtctctttttcccttggatcagccaagcgaaacttggagctttgacaaggaactttcctaagaaaccgctgataaccaggacaaaacacaaccaagggtacacgcaggcatgcacgggtttcctgcccagcgacggcttaagccagcccccgactggcctggccacactgctctccagtagcacagatgtctgctcctcctcttgaacttgggtgggaaaccccacccaaaagccccctttgttacttaggcaattccccttccctgactcccgagggctagggctagagcagacccgggtaagtaaaggcagacccagggctcctctagcctcatacccgtgccctcacagagccatgccccggcacctctgccctgtgtctttcatacctctacatgtctgcttgagatatttcctcagcctgaaagtttccccaaccatctgccagagaactcctatgcatcccttagaaccctgctcagacaccattacttttgtgaacgcttctgccacatcttgtcttccccaaaattgatcactccgccttctcctgggctcccgtagcacactataacatctgctggagtgttgctgttgcaccatactttcttgtacatttgtgtctcccttcccaactagactgtaagtgccttgcggtcagggactgaatcttgcccgtttatgtatgctccatgtctagcccatcatcctgcttggagcaagtaggcaggagctcaataaatgtttgttgcatgaaggaatgtctggagagctggatggggcatcatgaagagggtagggggtggatacaagtcatcacccaagcttctgggaggtcctggggctgggagagggtacagactcccatgccccttggctgcaccatggaagtgaccattcttcacggggtcttaagagggacaaacgttctggtgaattcctccatgggtgttgctgagcgtctgctatgtgcccatggccatgttagggtggaagggggaagacatgatgccaccccttcaggggacctacctcacagtgtttggggagacttgccctctccactgtctgaacctccttttccttctctgctttagtcaccatcatcactaacctccccatcccccactccacttgctgagtcccacttaccacctggcggcaatgaaccctcatctgcctgcctcccatcagctgtctggtggtggtggaggatgatgaggctcaggccagtttctcctggaaatgcaaagccttatatggtcttattggtacatgattgcagagaggggcacagggaatcctcccagctttagtaaaggagagactgaggtccagggaggggctgaaggatgtgcgagtggaactccagctctccgatccttgtttctcccccactccagcataagacctggaatccagaagtgaccctttctcaccatctttggggattctgtccctgccaccttagtcttattcatcttaattgcagtctccctgttctgaggagccaaaggaggaagagactttcggggaaagaggagaaggagctggtgacaggggtaggaaggtagacagggtcatgacctgaaacggtgtgacgactgctgacttccctttcctggacttgagctgatgaaggggaaatggtgttgcagtctcctctgtcagagccctcaggtgcagacggcacttgtctgccccctcagcctcagccttggcccacctggtccccagtgccctctcctctggctggggcaggaggacctgccggacatagccagatgtattacggatgactgcagtcagctcccccaggctcctgcttctcttgcctcctgcttttttccccagagctgtctccttatctccattcacttgtctatgggttactcctggaccctggggttaggagttggaatcaggctgttagcgataaaagggttcaagttgactcattttccttatcaggcttagtagttgaagtgacttgctgagcttcataattcttagagaacctgccatgaacccagctccctttctatgactcaccctgccaccctgtgacacatagagtctgaatggcaggtctggggctagaacccacgtcatctggacttggagtccagtgaccctttgggttaagcatgtgtgtgtgtgtgtgtgtgccatgatgcgggaggaaggtccctgctctctgtagctgttttcttcatcctttgctctacaagccctaacagccgattctgtcatccctagtctgcccctctcctgtttctccatctcctctgaccatgatttttttctgtccctggagggatgatggtctcattctcacctcctccacgaaacgtgttagcttttcatattcctagatccactcacttctcatcatctttttttttaaacaaaattttattgaaaaatgtaatatgacgtgtcaaagttgtaaagttattgagtaaataagcatgtatcctaaatattgaaaaatattctccttttgtaccaggctatgtgtcacggctttggcgctttgcacagactattagaaataccttataacattaaaaataggacattgaggccgggcgtggtggctcatgcctgtaatcccagcactttgggaggccagggtgggtggatcacctgaagtcaggagtttgagaccagcctggctaacacggtgaaaccccgtctctactaaatacaaaaaattagccgggcatgatggcacatgcctataatcctagctactcgggaggctgaggcaggagaattgcttgaatccgggagtcagaggttgcagtgagccgagattgtgccactgcacttcagcctgggcaacaagagtgaaactctatcaaaaaaaaaaataggacattgaagttggtttctttttttgatacagagtctcgctctgtcacccaggctggagtgcactggcaggatctcggctcactgcaacctctgcctcctgggttcaagcaattctcctgcctcagcctcctgagtagctgggattacaggcacgcgccaccacgcctggctaattttgtatatttagtagagacagggtttcaccatgttggtcaggttggtctcgaactcctgaccttgtgatccgcccacctcagcctcccaaagtgctgggattgcaggcgtgagccaccgcactctgctttttttttttttttttgccgccctctcacataccatactcccctgtatcacttatccttctgaagttgttattaatcattaatacaactagctgggcatagtggtgtgcgatggtagtcttagccactcggaaggctgatgtgggaggctagcttgaggccagtagttctaggttaggtgagctatgattgcaccattgcactttagcctgggtgagagcaagctcctgtttcaaaaaaaaaattaattgctaccacttactaaatgcttaatatatggcaaacacttgccaaacactttatatgcttgatttaagcatcaagctagctctgtgaagggtaccagcaggtttcccattttttagatgagcagaccgaggttcttctcgctgcttcatactggaaacttgcacttgattctgaggctcctgcttcttcaagaacactgctttgggttcgcttctcctgtccctggggtctccctttgtgatggtggtgagctgcttcctttctgaatccagcttcaaccctacagttctccagaagctggacgatggggtggagtaaagtcagctccccccgcagtgagggacactgaagctccattctcatctgcggatcacagaggggaagccaggaagagccaggggacggtggacttggggctgggaggtcatctcagagggataaggggtgaggagctctggtttcaagttccaaagccctaggacctccctcttctctgtctgcctgcatttctagcagcctcagcagctgcaggcccttgggcggggctggatgtagggaaggtcattgtaccaagaagatagttgggtaaatgtggtacctttgttgtaggattctcttgggagatgtctgcatcaatgaggatggcataaagtaaccagagtcaggatgtggggtctgactcagtgacagaaaaagtggcagtgtgtctctcatagccaaaggggcccttggaccggcagtcgggagtctggggttctctgttggctctgcctcctggcacattgggtttctggacctcagttttctcctctataaaaccgggcagttgggtgggcacggtggctcacacctgtaatcctagcactttaggaggctgaggtgggcagatcatttgggcccaggagttcaagacctgcctgtgtaacatggtgagaccctgtctctacaaaaaatacaaaaattacccaggcgtggtggtatgcacctatagtcccagctgcttgggaggctgaggtgggaggattacttgaacctgggaggtcgaggctgcagtgagctgcgatggtaccactgcactccagcctgggaaacggagcggaccctcaaaacaaaaacaaaaatgaaaaacaagcaaacgaagaaataaaaaaacctagggggttgtagtcgat

SEQ ID NO: 3 - DNA, 21 bp, synthetic construct
  source 1..21: mol_type = other DNA
acatcccaggaatgggtcttc

SEQ ID NO: 4 - DNA, 23 bp, synthetic construct
  source 1..23: mol_type = other DNA
actttggccactccatttctctt

SEQ ID NO: 5 - DNA, 29 bp, synthetic construct
  source 1..29: mol_type = other DNA
tgctatcgcgacagaacaattacaccgtc

SEQ ID NO: 6 - DNA, 16 bp, synthetic construct
  source 1..16: mol_type = other DNA
cttcatgcggttgtgc

SEQ ID NO: 7 - DNA, 16 bp, synthetic construct
  source 1..16: mol_type = other DNA
aggcatggaagacatc

SEQ ID NO: 8 - DNA, 16 bp, synthetic construct
  source 1..16: mol_type = other DNA
atgtaggcacagccac

SEQ ID NO: 9 - DNA, 16 bp, synthetic construct
  source 1..16: mol_type = other DNA
agaagatgtaggcaca

SEQ ID NO: 10 - DNA, 16 bp, synthetic construct
  source 1..16: mol_type = other DNA
gcccaggttggacagg

SEQ ID NO: 11 - DNA, 16 bp, synthetic construct
  source 1..16: mol_type = other DNA
gccgaaccacaggctc

SEQ ID NO: 12 - DNA, 16 bp, synthetic construct
  source 1..16: mol_type = other DNA
tgtcaaagctccaagt

SEQ ID NO: 13 - DNA, 16 bp, synthetic construct
  source 1..16: mol_type = other DNA
acccaagttcaagagg

SEQ ID NO: 14 - DNA, 16 bp, synthetic construct
  source 1..16: mol_type = other DNA
ttagacgcagacaggc

SEQ ID NO: 15 - DNA, 16 bp, synthetic construct
  source 1..16: mol_type = other DNA
gagaaggcggactctg

SEQ ID NO: 16 - DNA, 16 bp, synthetic construct
  source 1..16: mol_type = other DNA
gagtactggacctgag

SEQ ID NO: 17 - DNA, 16 bp, synthetic construct
  source 1..16: mol_type = other DNA
tgaactgggagtactg

SEQ ID NO: 18 - DNA, 16 bp, synthetic construct
  source 1..16: mol_type = other DNA
cccgagggcaggtgaa

SEQ ID NO: 19 - DNA, 16 bp, synthetic construct
  source 1..16: mol_type = other DNA
ggaaggagggctcccg

SEQ ID NO: 20 - DNA, 16 bp, synthetic construct
  source 1..16: mol_type = other DNA
ttccgaaggaaggagg

SEQ ID NO: 21 - DNA, 16 bp, synthetic construct
  source 1..16: mol_type = other DNA
cgggagttttccgaag

SEQ ID NO: 22 - DNA, 16 bp, synthetic construct
  source 1..16: mol_type = other DNA
tcagagccgggagttt

SEQ ID NO: 23 - DNA, 16 bp, synthetic construct
  source 1..16: mol_type = other DNA
ggctgaggaggagtca

SEQ ID NO: 24 - DNA, 16 bp, synthetic construct
  source 1..16: mol_type = other DNA
taaaggtgagcagggc

SEQ ID NO: 25 - DNA, 16 bp, synthetic construct
  source 1..16: mol_type = other DNA
attaaaggtgagcagg

SEQ ID NO: 26 - DNA, 16 bp, synthetic construct
  source 1..16: mol_type = other DNA
caattaaaggtgagca

SEQ ID NO: 27 - DNA, 16 bp, synthetic construct
  source 1..16: mol_type = other DNA
ctcaattaaaggtgag

SEQ ID NO: 28 - DNA, 16 bp, synthetic construct
  source 1..16: mol_type = other DNA
tctcaattaaaggtga

SEQ ID NO: 29 - DNA, 16 bp, synthetic construct
  source 1..16: mol_type = other DNA
tagcatctcaattaaa

SEQ ID NO: 30 - DNA, 16 bp, synthetic construct
  source 1..16: mol_type = other DNA
tcattagcatctcaat

SEQ ID NO: 31 - DNA, 16 bp, synthetic construct
  source 1..16: mol_type = other DNA
aggaatctcattagca

SEQ ID NO: 32 - DNA, 16 bp, synthetic construct
  source 1..16: mol_type = other DNA
tggaagcgacaggaat

SEQ ID NO: 33 - DNA, 16 bp, synthetic construct
  source 1..16: mol_type = other DNA
ggccagggatggaagc

SEQ ID NO: 34 - DNA, 16 bp, synthetic construct
  source 1..16: mol_type = other DNA
gtgcagcggcctggct

SEQ ID NO: 35 - DNA, 16 bp, synthetic construct
  source 1..16: mol_type = other DNA
cctgacaggtgcagcg

SEQ ID NO: 36 - DNA, 16 bp, synthetic construct
  source 1..16: mol_type = other DNA
ctccagcttgttcccc

SEQ ID NO: 37 - DNA, 16 bp, synthetic construct
  source 1..16: mol_type = other DNA
tcctccagcttgttcc

SEQ ID NO: 38 - DNA, 16 bp, synthetic construct
  source 1..16: mol_type = other DNA
ctcctccagcttgttc

SEQ ID NO: 39 - DNA, 16 bp, synthetic construct
  source 1..16: mol_type = other DNA
tgctcctccagcttgt

SEQ ID NO: 40 - DNA, 16 bp, synthetic construct
  source 1..16: mol_type = other DNA
cctgctcctccagctt

SEQ ID NO: 41 - DNA, 16 bp, synthetic construct
  source 1..16: mol_type = other DNA
gtcctgctcctccagc

SEQ ID NO: 42 - DNA, 16 bp, synthetic construct
  source 1..16: mol_type = other DNA
gtctagggtcctgctc

SEQ ID NO: 43 - DNA, 16 bp, synthetic construct
  source 1..16: mol_type = other DNA
tgcagaggtctagggt

SEQ ID NO: 44 - DNA, 16 bp, synthetic construct
  source 1..16: mol_type = other DNA
tggtatgggctgcaga

SEQ ID NO: 45 - DNA, 16 bp, synthetic construct
  source 1..16: mol_type = other DNA
catgagacctggtatg

SEQ ID NO: 46 - DNA, 16 bp, synthetic construct
  source 1..16: mol_type = other DNA
ggctagagtcctgctc

SEQ ID NO: 47 - DNA, 16 bp, synthetic construct
  source 1..16: mol_type = other DNA
ctggagtggactgtgg

SEQ ID NO: 48 - DNA, 16 bp, synthetic construct
  source 1..16: mol_type = other DNA
cgccgtgggctgctgg

SEQ ID NO: 49 - DNA, 16 bp, synthetic construct
  source 1..16: mol_type = other DNA
ctcgatcagggcctcc

SEQ ID NO: 50 - DNA, 16 bp, synthetic construct
  source 1..16: mol_type = other DNA
taggagcggtggaact

SEQ ID NO: 51 - DNA, 16 bp, synthetic construct
  source 1..16: mol_type = other DNA
ggtaggagcggtggaa

SEQ ID NO: 52 - DNA, 16 bp, synthetic construct
  source 1..16: mol_type = other DNA
agctctcggtaggagc

SEQ ID NO: 53 - DNA, 16 bp, synthetic construct
  source 1..16: mol_type = other DNA
ctcgaagagctctcgg

SEQ ID NO: 54 - DNA, 16 bp, synthetic construct
  source 1..16: mol_type = other DNA
cagaagaactcgaaga

SEQ ID NO: 55 - DNA, 16 bp, synthetic construct
  source 1..16: mol_type = other DNA
cagaaggccgtcttca

SEQ ID NO: 56 - DNA, 16 bp, synthetic construct
  source 1..16: mol_type = other DNA
gcccagaaggccgtct

SEQ ID NO: 57 - DNA, 16 bp, synthetic construct
  source 1..16: mol_type = other DNA
tgcagagccacagcac

SEQ ID NO: 58 - DNA, 16 bp, synthetic construct
  source 1..16: mol_type = other DNA
ccaaaggtgcagagcc

SEQ ID NO: 59 - DNA, 16 bp, synthetic construct
  source 1..16: mol_type = other DNA
catcatgccaaaggtg

SEQ ID NO: 60 - DNA, 16 bp, synthetic construct
  source 1..16: mol_type = other DNA
tgccagtacatcatgc

SEQ ID NO: 61 - DNA, 16 bp, synthetic construct
  source 1..16: mol_type = other DNA
gccgaattgccagtac

SEQ ID NO: 62 - DNA, 16 bp, synthetic construct
  source 1..16: mol_type = other DNA
gaaaagcaggccgaat

SEQ ID NO: 63 - DNA, 16 bp, synthetic construct
  source 1..16: mol_type = other DNA
gaagtactctccgaaa

SEQ ID NO: 64 - DNA, 16 bp, synthetic construct
  source 1..16: mol_type = other DNA
tccgagttgaggttga

SEQ ID NO: 65 - DNA, 16 bp, synthetic construct
  source 1..16: mol_type = other DNA
acgagcttgtccgagt

SEQ ID NO: 66 - DNA, 16 bp, synthetic construct
  source 1..16: mol_type = other DNA
attgagggtgcagatg

SEQ ID NO: 67 - DNA, 16 bp, synthetic construct
  source 1..16: mol_type = other DNA
taatttccgggtacct

SEQ ID NO: 68 - DNA, 16 bp, synthetic construct
  source 1..16: mol_type = other DNA
tgtgatgcggtccagc

SEQ ID NO: 69 - DNA, 16 bp, synthetic construct
  source 1..16: mol_type = other DNA
gtacaggtcaaagagc

SEQ ID NO: 70 - DNA, 16 bp, synthetic construct
  source 1..16: mol_type = other DNA
tatttgtacaggtcaa

SEQ ID NO: 71 - DNA, 16 bp, synthetic construct
  source 1..16: mol_type = other DNA
tgtatttgtacaggtc

SEQ ID NO: 72 - DNA, 16 bp, synthetic construct
  source 1..16: mol_type = other DNA
ggtgaaggagctgtat

SEQ ID NO: 73 - DNA, 16 bp, synthetic construct
  source 1..16: mol_type = other DNA
cgagagtggtgaagga

SEQ ID NO: 74 - DNA, 16 bp, synthetic construct
  source 1..16: mol_type = other DNA
gccggccacgagagtg

SEQ ID NO: 75 - DNA, 16 bp, synthetic construct
  source 1..16: mol_type = other DNA
gctgcgggagccggcc

SEQ ID NO: 76 - DNA, 16 bp, synthetic construct
  source 1..16: mol_type = other DNA
cgcgacggctgcggga

SEQ ID NO: 77 - DNA, 16 bp, synthetic construct
  source 1..16: mol_type = other DNA
ccgcaggtcgcgacgg

SEQ ID NO: 78 - DNA, 16 bp, synthetic construct
  source 1..16: mol_type = other DNA
tcgacgggccccgtga

SEQ ID NO: 79 - DNA, 16 bp, synthetic construct
  source 1..16: mol_type = other DNA
cgctacgggctcgacg

SEQ ID NO: 80 - DNA, 16 bp, synthetic construct
  source 1..16: mol_type = other DNA
gctggaggccacgcta

SEQ ID NO: 81 - DNA, 16 bp, synthetic construct
  source 1..16: mol_type = other DNA
ttccagtccttccagt

SEQ ID NO: 82 - DNA, 16 bp, synthetic construct
  source 1..16: mol_type = other DNA
agccgatcttccagtc

SEQ ID NO: 83 - DNA, 16 bp, synthetic construct
  source 1..16: mol_type = other DNA
gcacagctggaagccg

SEQ ID NO: 84 - DNA, 16 bp, synthetic construct
  source 1..16: mol_type = other DNA
ccgatttgttctggtt

SEQ ID NO: 85 - DNA, 16 bp, synthetic construct
  source 1..16: mol_type = other DNA
aagcagtccgatttgt

SEQ ID NO: 86 - DNA, 16 bp, synthetic construct
  source 1..16: mol_type = other DNA
gatgagtatgtctggt

SEQ ID NO: 87 - DNA, 16 bp, synthetic construct
  source 1..16: mol_type = other DNA
ccgcatccacccctga

SEQ ID NO: 88 - DNA, 16 bp, synthetic construct
  source 1..16: mol_type = other DNA
atgtagtggaagcggt

SEQ ID NO: 89 - DNA, 16 bp, synthetic construct
  source 1..16: mol_type = other DNA
cgacaggatgttgatg

SEQ ID NO: 90 - DNA, 16 bp, synthetic construct
  source 1..16: mol_type = other DNA
tggcagcctcgacagg

SEQ ID NO: 91 - DNA, 16 bp, synthetic construct
  source 1..16: mol_type = other DNA
ggcagagtctctggca

SEQ ID NO: 92 - DNA, 16 bp, synthetic construct
  source 1..16: mol_type = other DNA
ctccagggatggcaga

SEQ ID NO: 93 - DNA, 16 bp, synthetic construct
  source 1..16: mol_type = other DNA
gatgaagttgcccagc

SEQ ID NO: 94 - DNA, 16 bp, synthetic construct
  source 1..16: mol_type = other DNA
aggcgaagatgaagtt

SEQ ID NO: 95 - DNA, 16 bp, synthetic construct
  source 1..16: mol_type = other DNA
ttgaagcggcaggcga

SEQ ID NO: 96 - DNA, 16 bp, synthetic construct
  source 1..16: mol_type = other DNA
ttgcaggagacctggt

SEQ ID NO: 97 - DNA, 16 bp, synthetic construct
  source 1..16: mol_type = other DNA
gtaattcgcctggttg

SEQ ID NO: 98 - DNA, 16 bp, synthetic construct
  source 1..16: mol_type = other DNA
agtgagagtaattcgc

SEQ ID NO: 99 - DNA, 16 bp, synthetic construct
  source 1..16: mol_type = other DNA
atccagaggttggagt

SEQ ID NO: 100 - DNA, 16 bp, synthetic construct
  source 1..16: mol_type = other DNA
tggaagacatccagag

SEQ ID NO: 101 - DNA, 16 bp, synthetic construct
  source 1..16: mol_type = other DNA
ttccaggcatggaaga

SEQ ID NO: 102 - DNA, 16 bp, synthetic construct
  source 1..16: mol_type = other DNA
gaccgttgttgattcc

SEQ ID NO: 103 - DNA, 16 bp, synthetic construct
  source 1..16: mol_type = other DNA
cagggacagaccgttg

SEQ ID NO: 104 - DNA, 16 bp, synthetic construct
  source 1..16: mol_type = other DNA
cgcagcatcagggaca

SEQ ID NO: 105 - DNA, 16 bp, synthetic construct
  source 1..16: mol_type = other DNA
agtcattctgctctgc

SEQ ID NO: 106 - DNA, 16 bp, synthetic construct
  source 1..16: mol_type = other DNA
atgaagtcattctgct

SEQ ID NO: 107 - DNA, 16 bp, synthetic construct
  source 1..16: mol_type = other DNA
gggaatgaagtcattc

SEQ ID NO: 108 - DNA, 16 bp, synthetic construct
  source 1..16: mol_type = other DNA
agtcactgtggacagc

SEQ ID NO: 109 - DNA, 16 bp, synthetic construct
  source 1..16: mol_type = other DNA
cattacccgggcccca

SEQ ID NO: 110 - DNA, 16 bp, synthetic construct
  source 1..16: mol_type = other DNA
aggcaggttcatcctg

SEQ ID NO: 111 - DNA, 16 bp, synthetic construct
  source 1..16: mol_type = other DNA
tccataaaggcaggtt

SEQ ID NO: 112 - DNA, 16 bp, synthetic construct
  source 1..16: mol_type = other DNA
caccatcatccataaa

SEQ ID NO: 113 - DNA, 16 bp, synthetic construct
  source 1..16: mol_type = other DNA
agccaccatcatccat

SEQ ID NO: 114 - DNA, 16 bp, synthetic construct
  source 1..16: mol_type = other DNA
ttaaagccaccatcat

SEQ ID NO: 115 - DNA, 16 bp, synthetic construct
  source 1..16: mol_type = other DNA
ccgcaagttaaagcca

SEQ ID NO: 116 - DNA, 16 bp, synthetic construct
  source 1..16: mol_type = other DNA
cgccaggccgcaagtt

SEQ ID NO: 117 - DNA, 16 bp, synthetic construct
  source 1..16: mol_type = other DNA
cctcatgctgatggag

SEQ ID NO: 118 - DNA, 16 bp, synthetic construct
  source 1..16: mol_type = other DNA
gtccagggtttccttc

SEQ ID NO: 119 - DNA, 16 bp, synthetic construct
  source 1..16: mol_type = other DNA
ccccaagtctgtccag

SEQ ID NO: 120 - DNA, 16 bp, synthetic construct
  source 1..16: mol_type = other DNA
ccataatcgcccccaa

SEQ ID NO: 121 - DNA, 16 bp, synthetic construct
  source 1..16: mol_type = other DNA
attcttggtgcagtcg

SEQ ID NO: 122 - DNA, 16 bp, synthetic construct
  source 1..16: mol_type = other DNA
catcactgccattctt

SEQ ID NO: 123 - DNA, 16 bp, synthetic construct
  source 1..16: mol_type = other DNA
acaggaacatcactgc

SEQ ID NO: 124 - DNA, 16 bp, synthetic construct
  source 1..16: mol_type = other DNA
gtaaaggttctcaaca

SEQ ID NO: 125 - DNA, 16 bp, synthetic construct
  source 1..16: mol_type = other DNA
ttgaagggtaaaggtt

SEQ ID NO: 126 - DNA, 16 bp, synthetic construct
  source 1..16: mol_type = other DNA
atacacacctgctgtg

SEQ ID NO: 127 - DNA, 16 bp, synthetic construct
  source 1..16: mol_type = other DNA
caggagtgaatacaca

SEQ ID NO: 128 - DNA, 16 bp, synthetic construct
  source 1..16: mol_type = other DNA
gatcatgctctcctgg

SEQ ID NO: 129 - DNA, 16 bp, synthetic construct
  source 1..16: mol_type = other DNA
ccacactccttgatca

SEQ ID NO: 130 - DNA, 16 bp, synthetic construct
  source 1..16: mol_type = other DNA
ggcacagccacactcc

SEQ ID NO: 131 - DNA, 16 bp, synthetic construct
  source 1..16: mol_type = other DNA
gtaggcacagccacac

SEQ ID NO: 132 - DNA, 16 bp, synthetic construct
  source 1..16: mol_type = other DNA
aagatgtaggcacagc

SEQ ID NO: 133 - DNA, 16 bp, synthetic construct
  source 1..16: mol_type = other DNA
gcggatagaagatgta

SEQ ID NO: 134 - DNA, 16 bp, synthetic construct
  source 1..16: mol_type = other DNA
agtcacagtactccac

SEQ ID NO: 135 - DNA, 16 bp, synthetic construct
  source 1..16: mol_type = other DNA
tgctttctgtagtcac

SEQ ID NO: 136 - DNA, 16 bp, synthetic construct
  source 1..16: mol_type = other DNA
aggaactgtgctttct

SEQ ID NO: 137 - DNA, 16 bp, synthetic construct
  source 1..16: mol_type = other DNA
tagcagtacccccagg

SEQ ID NO: 138 - DNA, 16 bp, synthetic construct
  source 1..16: mol_type = other DNA
cttatagtagcagtac

SEQ ID NO: 139 - DNA, 16 bp, synthetic construct
  source 1..16: mol_type = other DNA
gtcaacctggagctta

SEQ ID NO: 140 - DNA, 16 bp, synthetic construct
  source 1..16: mol_type = other DNA
gaggagaagtcaacct

SEQ ID NO: 141 - DNA, 16 bp, synthetic construct
  source 1..16: mol_type = other DNA
gcccaggtggtctgag

SEQ ID NO: 142 - DNA, 16 bp, synthetic construct
  source 1..16: mol_type = other DNA
gtgaaacagcccaggt

SEQ ID NO: 143 - DNA, 16 bp, synthetic construct
  source 1..16: mol_type = other DNA
ggcacttggtgaaaca

SEQ ID NO: 144 - DNA, 16 bp, synthetic construct
  source 1..16: mol_type = other DNA
ggcttccggcacttgg

SEQ ID NO: 145 - DNA, 16 bp, synthetic construct
  source 1..16: mol_type = other DNA
cgctgcatggcttccg

SEQ ID NO: 146 - DNA, 16 bp, synthetic construct
  source 1..16: mol_type = other DNA
agctggtagctggtca

SEQ ID NO: 147 - DNA, 16 bp, synthetic construct
  source 1..16: mol_type = other DNA
cagcagagagctggta

SEQ ID NO: 148 - DNA, 16 bp, synthetic construct
  source 1..16: mol_type = other DNA
gagtaaccagcagaga

SEQ ID NO: 149 - DNA, 16 bp, synthetic construct
  source 1..16: mol_type = other DNA
ttgtagttcagctcct

SEQ ID NO: 150 - DNA, 16 bp, synthetic construct
  source 1..16: mol_type = other DNA
agaattggttttgtag

SEQ ID NO: 151 - DNA, 16 bp, synthetic construct
  source 1..16: mol_type = other DNA
agggagactcagaatt

SEQ ID NO: 152 - DNA, 16 bp, synthetic construct
  source 1..16: mol_type = other DNA
acaggagggtgaccat

SEQ ID NO: 153 - DNA, 16 bp, synthetic construct
  source 1..16: mol_type = other DNA
ctccactggctgccca

SEQ ID NO: 154 - DNA, 16 bp, synthetic construct
  source 1..16: mol_type = other DNA
ccacaggctccactgg

SEQ ID NO: 155 - DNA, 16 bp, synthetic construct
  source 1..16: mol_type = other DNA
aaccacaggctccact

SEQ ID NO: 156 - DNA, 16 bp, synthetic construct
  source 1..16: mol_type = other DNA
agccgaaccacaggct

SEQ ID NO: 157 - DNA, 16 bp, synthetic construct
  source 1..16: mol_type = other DNA
caccgaggagccgaac

SEQ ID NO: 158 - DNA, 16 bp, synthetic construct
  source 1..16: mol_type = other DNA
acagacaacaccgagg

SEQ ID NO: 159 - DNA, 16 bp, synthetic construct
  source 1..16: mol_type = other DNA
ctccaccacagacaac

SEQ ID NO: 160 - DNA, 16 bp, synthetic construct
  source 1..16: mol_type = other DNA
gctcagccatctccac

SEQ ID NO: 161 - DNA, 16 bp, synthetic construct
  source 1..16: mol_type = other DNA
caaagacgagctcagc

SEQ ID NO: 162 - DNA, 16 bp, synthetic construct
  source 1..16: mol_type = other DNA
cagcaggtcaaagacg

SEQ ID NO: 163 - DNA, 16 bp, synthetic construct
  source 1..16: mol_type = other DNA
gaacatgatgaccagc

SEQ ID NO: 164 - DNA, 16 bp, synthetic construct
  source 1..16: mol_type = other DNA
gcatgaggaacatgat

SEQ ID NO: 165 - DNA, 16 bp, synthetic construct
  source 1..16: mol_type = other DNA
aaccttcggagcagca

SEQ ID NO: 166 - DNA, 16 bp, synthetic construct
  source 1..16: mol_type = other DNA
ggcttcggaaccttcg

SEQ ID NO: 167 - DNA, 16 bp, synthetic construct
  source 1..16: mol_type = other DNA
cagtatcggcttcgga

SEQ ID NO: 168 - DNA, 16 bp, synthetic construct
  source 1..16: mol_type = other DNA
ctggagaccagtatcg

SEQ ID NO: 169 - DNA, 16 bp, synthetic construct
  source 1..16: mol_type = other DNA
tgccagggtggaggct

SEQ ID NO: 170 - DNA, 16 bp, synthetic construct
  source 1..16: mol_type = other DNA
cagaagtgggaaggag

SEQ ID NO: 171 - DNA, 16 bp, synthetic construct
  source 1..16: mol_type = other DNA
aaggacagagacatgg

SEQ ID NO: 172 - DNA, 16 bp, synthetic construct
  source 1..16: mol_type = other DNA
gtcaaggctggagagg

SEQ ID NO: 173 - DNA, 16 bp, synthetic construct
  source 1..16: mol_type = other DNA
gcccagggtggcatag

SEQ ID NO: 174 - DNA, 16 bp, synthetic construct
  source 1..16: mol_type = other DNA
gaggaactggcccctg

SEQ ID NO: 175 - DNA, 16 bp, synthetic construct
  source 1..16: mol_type = other DNA
ggacaggtggaggaac

SEQ ID NO: 176 - DNA, 16 bp, synthetic construct
  source 1..16: mol_type = other DNA
ccccagaggacaggtg

SEQ ID NO: 177 - DNA, 16 bp, synthetic construct
  source 1..16: mol_type = other DNA
gagaaacctctccttc

SEQ ID NO: 178 - DNA, 16 bp, synthetic construct
  source 1..16: mol_type = other DNA
accagaggagcatctg

SEQ ID NO: 179 - DNA, 16 bp, synthetic construct
  source 1..16: mol_type = other DNA
tgccagggccagcacc

SEQ ID NO: 180 - DNA, 16 bp, synthetic construct
  source 1..16: mol_type = other DNA
ttcaatcttgccaggg

SEQ ID NO: 181 - DNA, 16 bp, synthetic construct
  source 1..16: mol_type = other DNA
gcacatccttcaatct

SEQ ID NO: 182 - DNA, 16 bp, synthetic construct
  source 1..16: mol_type = other DNA
gaggaagccctgcaca

SEQ ID NO: 183 - DNA, 16 bp, synthetic construct
  source 1..16: mol_type = other DNA
agtttgggcggctctg

SEQ ID NO: 184 - DNA, 16 bp, synthetic construct
  source 1..16: mol_type = other DNA
tcaacggcagtttggg

SEQ ID NO: 185 - DNA, 16 bp, synthetic construct
  source 1..16: mol_type = other DNA
ccacacatcaacggca

SEQ ID NO: 186 - DNA, 16 bp, synthetic construct
  source 1..16: mol_type = other DNA
acccatcttgcttccc

SEQ ID NO: 187 - DNA, 16 bp, synthetic construct
  source 1..16: mol_type = other DNA
agcaacttcctgagcc

SEQ ID NO: 188 - DNA, 16 bp, synthetic construct
  source 1..16: mol_type = other DNA
agctactgttcttgga

SEQ ID NO: 189 - DNA, 16 bp, synthetic construct
  source 1..16: mol_type = other DNA
cacttctgggcagctt

SEQ ID NO: 190 - DNA, 16 bp, synthetic construct
  source 1..16: mol_type = other DNA
gccaaggcacttctgg

SEQ ID NO: 191 - DNA, 16 bp, synthetic construct
  source 1..16: mol_type = other DNA
gtacagggctggagcc

SEQ ID NO: 192 - DNA, 16 bp, synthetic construct
  source 1..16: mol_type = other DNA
gttcagaggcagtacc

SEQ ID NO: 193 - DNA, 16 bp, synthetic construct
  source 1..16: mol_type = other DNA
ccagagtgttcagagg

SEQ ID NO: 194 - DNA, 16 bp, synthetic construct
  source 1..16: mol_type = other DNA
agccgcagttgggtgg

SEQ ID NO: 195 - DNA, 16 bp, synthetic construct
  source 1..16: mol_type = other DNA
agagacttagccgcag

SEQ ID NO: 196 - DNA, 16 bp, synthetic construct
  source 1..16: mol_type = other DNA
gggaaaaagagactta

SEQ ID NO: 197 - DNA, 16 bp, synthetic construct
  source 1..16: mol_type = other DNA
ggctgatccaagggaa

SEQ ID NO: 198 - DNA, 16 bp, synthetic construct
  source 1..16: mol_type = other DNA
tccaagtttcgcttgg

SEQ ID NO: 199 - DNA, 16 bp, synthetic construct
  source 1..16: mol_type = other DNA
gtcaaagctccaagtt

SEQ ID NO: 200 - DNA, 16 bp, synthetic construct
  source 1..16: mol_type = other DNA
aggaaagttccttgtc

SEQ ID NO: 201 - DNA, 16 bp, synthetic construct
  source 1..16: mol_type = other DNA
tatcagcggtttctta

SEQ ID NO: 202 - DNA, 16 bp, synthetic construct
  source 1..16: mol_type = other DNA
ggaaacccgtgcatgc

SEQ ID NO: 203 - DNA, 16 bp, synthetic construct
  source 1..16: mol_type = other DNA
cgctgggcaggaaacc

SEQ ID NO: 204 - DNA, 16 bp, synthetic construct
  source 1..16: mol_type = other DNA
cttaagccgtcgctgg

SEQ ID NO: 205 - DNA, 16 bp, synthetic construct
  source 1..16: mol_type = other DNA
ggccaggccagtcggg

SEQ ID NO: 206 - DNA, 16 bp, synthetic construct
  source 1..16: mol_type = other DNA
gagcagtgtggccagg

SEQ ID NO: 207 - DNA, 16 bp, synthetic construct
  source 1..16: mol_type = other DNA
tactggagagcagtgt

SEQ ID NO: 208 - DNA, 16 bp, synthetic construct
  source 1..16: mol_type = other DNA
agacatctgtgctact

SEQ ID NO: 209 - DNA, 16 bp, synthetic construct
  source 1..16: mol_type = other DNA
caagaggaggagcaga

SEQ ID NO: 210 - DNA, 16 bp, synthetic construct
  source 1..16: mol_type = other DNA
cccaagttcaagagga

SEQ ID NO: 211 - DNA, 16 bp, synthetic construct
  source 1..16: mol_type = other DNA
cctaagtaacaaaggg

SEQ ID NO: 212 - DNA, 16 bp, synthetic construct
  source 1..16: mol_type = other DNA
gggaattgcctaagta

SEQ ID NO: 213 - DNA, 16 bp, synthetic construct
  source 1..16: mol_type = other DNA
acttacccgggtctgc

SEQ ID NO: 214 - DNA, 16 bp, synthetic construct
  source 1..16: mol_type = other DNA
tgcctttacttacccg

SEQ ID NO: 215 - DNA, 16 bp, synthetic construct
  source 1..16: mol_type = other DNA
gctagaggagccctgg

SEQ ID NO: 216 - DNA, 16 bp, synthetic construct
  source 1..16: mol_type = other DNA
gtatgaggctagagga

SEQ ID NO: 217 - DNA, 16 bp, synthetic construct
  source 1..16: mol_type = other DNA
ggcacgggtatgaggc

SEQ ID NO: 218 - DNA, 16 bp, synthetic construct
  source 1..16: mol_type = other DNA
gggcatggctctgtga

SEQ ID NO: 219 - DNA, 16 bp, synthetic construct
  source 1..16: mol_type = other DNA
aaagacacagggcaga

SEQ ID NO: 220 - DNA, 16 bp, synthetic construct
  source 1..16: mol_type = other DNA
aggtatgaaagacaca

SEQ ID NO: 221 - DNA, 16 bp, synthetic construct
  source 1..16: mol_type = other DNA
acatgtagaggtatga

SEQ ID NO: 222 - DNA, 16 bp, synthetic construct
  source 1..16: mol_type = other DNA
tctcaagcagacatgt

SEQ ID NO: 223 - DNA, 16 bp, synthetic construct
  source 1..16: mol_type = other DNA
ggaaatatctcaagca

SEQ ID NO: 224 - DNA, 16 bp, synthetic construct
  source 1..16: mol_type = other DNA
aactttcaggctgagg

SEQ ID NO: 225 - DNA, 16 bp, synthetic construct
  source 1..16: mol_type = other DNA
cataggagttctctgg

SEQ ID NO: 226 - DNA, 16 bp, synthetic construct
  source 1..16: mol_type = other DNA
agggatgcataggagt

SEQ ID NO: 227 - DNA, 16 bp, synthetic construct
  source 1..16: mol_type = other DNA
gagcagggttctaagg

SEQ ID NO: 228 - DNA, 16 bp, synthetic construct
  source 1..16: mol_type = other DNA
agtaatggtgtctgag

SEQ ID NO: 229 - DNA, 16 bp, synthetic construct
  source 1..16: mol_type = other DNA
tcacaaaagtaatggt

SEQ ID NO: 230 - DNA, 16 bp, synthetic construct
  source 1..16: mol_type = other DNA
caagatgtggcagaag

SEQ ID NO: 231 - DNA, 16 bp, synthetic construct
  source 1..16: mol_type = other DNA
gggaagacaagatgtg

SEQ ID NO: 232 - DNA, 16 bp, synthetic construct
  source 1..16: mol_type = other DNA
agtgatcaattttggg

SEQ ID NO: 233 - DNA, 16 bp, synthetic construct
  source 1..16: mol_type = other DNA
gagaaggcggagtgat

SEQ ID NO: 234 - DNA, 16 bp, synthetic construct
  source 1..16: mol_type = other DNA
gctacgggagcccagg

SEQ ID NO: 235 - DNA, 16 bp, synthetic construct
  source 1..16: mol_type = other DNA
ttatagtgtgctacgg

SEQ ID NO: 236 - DNA, 16 bp, synthetic construct
  source 1..16: mol_type = other DNA
gcagatgttatagtgt

SEQ ID NO: 237 - DNA, 16 bp, synthetic construct
  source 1..16: mol_type = other DNA
caacactccagcagat

SEQ ID NO: 238 - DNA, 16 bp, synthetic construct
  source 1..16: mol_type = other DNA
gcaacagcaacactcc

SEQ ID NO: 239 - DNA, 16 bp, synthetic construct
  source 1..16: mol_type = other DNA
aagtatggtgcaacag

SEQ ID NO: 240 - DNA, 16 bp, synthetic construct
  source 1..16: mol_type = other DNA
tacaagaaagtatggt

SEQ ID NO: 241 - DNA, 16 bp, synthetic construct
  source 1..16: mol_type = other DNA
ggagacacaaatgtac

SEQ ID NO: 242 - DNA, 16 bp, synthetic construct
  source 1..16: mol_type = other DNA
ttacagtctagttggg

SEQ ID NO: 243 - DNA, 16 bp, synthetic construct
  source 1..16: mol_type = other DNA
cgcaaggcacttacag

SEQ ID NO: 244 - DNA, 16 bp, synthetic construct
  source 1..16: mol_type = other DNA
caagattcagtccctg

SEQ ID NO: 245 - DNA, 16 bp, synthetic construct
  source 1..16: mol_type = other DNA
aaacgggcaagattca

SEQ ID NO: 246 - DNA, 16 bp, synthetic construct
  source 1..16: mol_type = other DNA
catacataaacgggca

SEQ ID NO: 247 - DNA, 16 bp, synthetic construct
  source 1..16: mol_type = other DNA
catggagcatacataa

SEQ ID NO: 248 - DNA, 16 bp, synthetic construct
  source 1..16: mol_type = other DNA
ggctagacatggagca

SEQ ID NO: 249 - DNA, 16 bp, synthetic construct
  source 1..16: mol_type = other DNA
ggatgatgggctagac

SEQ ID NO: 250 - DNA, 16 bp, synthetic construct
  source 1..16: mol_type = other DNA
tccaagcaggatgatg

SEQ ID NO: 251 - DNA, 16 bp, synthetic construct
  source 1..16: mol_type = other DNA
tgcctacttgctccaa

SEQ ID NO: 252 - DNA, 16 bp, synthetic construct
  source 1..16: mol_type = other DNA
ttgagctcctgcctac

SEQ ID NO: 253 - DNA, 16 bp, synthetic construct
  source 1..16: mol_type = other DNA
tattgagctcctgcct

SEQ ID NO: 254 - DNA, 16 bp, synthetic construct
  source 1..16: mol_type = other DNA
ttattgagctcctgcc

SEQ ID NO: 255 - DNA, 16 bp, synthetic construct
  source 1..16: mol_type = other DNA
aatcagttttctgagg

SEQ ID NO: 256 - DNA, 16 bp, synthetic construct
  source 1..16: mol_type = other DNA
aaggataaatcagttt

SEQ ID NO: 257 - DNA, 16 bp, synthetic construct
  source 1..16: mol_type = other DNA
agaaactgacccttcc

SEQ ID NO: 258 - DNA, 16 bp, synthetic construct
  source 1..16: mol_type = other DNA
cctaatgaagaaactg

SEQ ID NO: 259 - DNA, 16 bp, synthetic construct
  source 1..16: mol_type = other DNA
cttcattgtcctaatg

SEQ ID NO: 260 - DNA, 16 bp, synthetic construct
  source 1..16: mol_type = other DNA
agctggatttttcttc

SEQ ID NO: 261 - DNA, 16 bp, synthetic construct
  source 1..16: mol_type = other DNA
gaagggacagctggat

SEQ ID NO: 262 - DNA, 16 bp, synthetic construct
  source 1..16: mol_type = other DNA
catgatacctcccctt

SEQ ID NO: 263 - DNA, 16 bp, synthetic construct
  source 1..16: mol_type = other DNA
tgatactgctcatgat

SEQ ID NO: 264 - DNA, 16 bp, synthetic construct
  source 1..16: mol_type = other DNA
tcctagcacctccctt

SEQ ID NO: 265 - DNA, 16 bp, synthetic construct
  source 1..16: mol_type = other DNA
acctttcgagttttgt

SEQ ID NO: 266 - DNA, 16 bp, synthetic construct
  source 1..16: mol_type = other DNA
tgatagggccaccttt

SEQ ID NO: 267 - DNA, 16 bp, synthetic construct
  source 1..16: mol_type = other DNA
ctagaacggcctctcc

SEQ ID NO: 268 - DNA, 16 bp, synthetic construct
  source 1..16: mol_type = other DNA
ccggagctgggcttcc

SEQ ID NO: 269 - DNA, 16 bp, synthetic construct
  source 1..16: mol_type = other DNA
caaaagtgccggagct

SEQ ID NO: 270 - DNA, 16 bp, synthetic construct
  source 1..16: mol_type = other DNA
cagcagacctgcggga

SEQ ID NO: 271 - DNA, 16 bp, synthetic construct
  source 1..16: mol_type = other DNA
ctggagccagcagacc

SEQ ID NO: 272 - DNA, 16 bp, synthetic construct
  source 1..16: mol_type = other DNA
ccacattctcccactc

SEQ ID NO: 273 - DNA, 16 bp, synthetic construct
  source 1..16: mol_type = other DNA
tcccaccctgcgccca

SEQ ID NO: 274 - DNA, 16 bp, synthetic construct
  source 1..16: mol_type = other DNA
ggccatgcccatgtcc

SEQ ID NO: 275 - DNA, 16 bp, synthetic construct
  source 1..16: mol_type = other DNA
cccgagtgaggctgcc

SEQ ID NO: 276 - DNA, 16 bp, synthetic construct
  source 1..16: mol_type = other DNA
ggctgagctctgggcc

SEQ ID NO: 277 - DNA, 16 bp, synthetic construct
  source 1..16: mol_type = other DNA
ggtcagggtcaaggct

SEQ ID NO: 278 - DNA, 16 bp, synthetic construct
  source 1..16: mol_type = other DNA
ccccggagtggattgg

SEQ ID NO: 279 - DNA, 16 bp, synthetic construct
  source 1..16: mol_type = other DNA
ggcctttcggcttgag

SEQ ID NO: 280 - DNA, 16 bp, synthetic construct
  source 1..16: mol_type = other DNA
ggcgagtgtcggtggc

SEQ ID NO: 281 - DNA, 16 bp, synthetic construct
  source 1..16: mol_type = other DNA
ggtcatcccgccctga

SEQ ID NO: 282 - DNA, 16 bp, synthetic construct
  source 1..16: mol_type = other DNA
cggtacccaggtcatc

SEQ ID NO: 283 - DNA, 16 bp, synthetic construct
  source 1..16: mol_type = other DNA
cgtgaccgcggtaccc

SEQ ID NO: 284 - DNA, 16 bp, synthetic construct
  source 1..16: mol_type = other DNA
ggtgagggcctcggcc

SEQ ID NO: 285 - DNA, 16 bp, synthetic construct
  source 1..16: mol_type = other DNA
cggaacttgtctgccc

SEQ ID NO: 286 - DNA, 16 bp, synthetic construct
  source 1..16: mol_type = other DNA
gggaacccggaacttg

SEQ ID NO: 287 - DNA, 16 bp, synthetic construct
  source 1..16: mol_type = other DNA
cctagaagggaacccg

SEQ ID NO: 288 - DNA, 16 bp, synthetic construct
  source 1..16: mol_type = other DNA
gcccggacctagaagg

SEQ ID NO: 289 - DNA, 16 bp, synthetic construct
  source 1..16: mol_type = other DNA
agagaggcaggaggcg

SEQ ID NO: 290 - DNA, 16 bp, synthetic construct
  source 1..16: mol_type = other DNA
ttgaaggagagaggca

SEQ ID NO: 291 - DNA, 16 bp, synthetic construct
  source 1..16: mol_type = other DNA
gtggactgtttattga

SEQ ID NO: 292 - DNA, 16 bp, synthetic construct
  source 1..16: mol_type = other DNA
ggacactgtggactgt

SEQ ID NO: 293 - DNA, 16 bp, synthetic construct
  source 1..16: mol_type = other DNA
gcccagccgggacact

SEQ ID NO: 294 - DNA, 16 bp, synthetic construct
  source 1..16: mol_type = other DNA
ccacggcgagcccagc

SEQ ID NO: 295 - DNA, 16 bp, synthetic construct
  source 1..16: mol_type = other DNA
gcggaggccacggcga

SEQ ID NO: 296 - DNA, 16 bp, synthetic construct
  source 1..16: mol_type = other DNA
cgggaaggcggaggcc

SEQ ID NO: 297 - DNA, 16 bp, synthetic construct
  source 1..16: mol_type = other DNA
aaacaggtgtgtccgc

SEQ ID NO: 298 - DNA, 16 bp, synthetic construct
  source 1..16: mol_type = other DNA
gtgaagggtaaacagg

SEQ ID NO: 299 - DNA, 16 bp, synthetic construct
  source 1..16: mol_type = other DNA
ggccgtccggcggtga

SEQ ID NO: 300 - DNA, 16 bp, synthetic construct
  source 1..16: mol_type = other DNA
ggagaagcctgggcgg

SEQ ID NO: 301 - DNA, 16 bp, synthetic construct
  source 1..16: mol_type = other DNA
gtccatcccggagaag

SEQ ID NO: 302 - DNA, 16 bp, synthetic construct
  source 1..16: mol_type = other DNA
cgggaggccggtccat

SEQ ID NO: 303 - DNA, 16 bp, synthetic construct
  source 1..16: mol_type = other DNA
ggtcagggtcctcatc

SEQ ID NO: 304 - DNA, 16 bp, synthetic construct
  source 1..16: mol_type = other DNA
agcgagtgtctggccc

SEQ ID NO: 305 - DNA, 16 bp, synthetic construct
  source 1..16: mol_type = other DNA
gaagagggtcaggcca

SEQ ID NO: 306 - DNA, 16 bp, synthetic construct
  source 1..16: mol_type = other DNA
gagtaattcctggttg

SEQ ID NO: 307 - DNA, 16 bp, synthetic construct
  source 1..16: mol_type = other DNA
tgtctttaaaacggac

SEQ ID NO: 308 - DNA, 16 bp, synthetic construct
  source 1..16: mol_type = other DNA
gaggagataggcctgc

SEQ ID NO: 309 - DNA, 16 bp, synthetic construct
  source 1..16: mol_type = other DNA
aaaaagggctggagga

SEQ ID NO: 310 - DNA, 16 bp, synthetic construct
  source 1..16: mol_type = other DNA
aatcagacccaaaaag

SEQ ID NO: 311 - DNA, 16 bp, synthetic construct
  source 1..16: mol_type = other DNA
gaggagggtcagagaa

SEQ ID NO: 312 - DNA, 16 bp, synthetic construct
  source 1..16: mol_type = other DNA
ttgcaggaatgtgggc

SEQ ID NO: 313 - DNA, 16 bp, synthetic construct
  source 1..16: mol_type = other DNA
ggccaggaatgtgtaa

SEQ ID NO: 314 - DNA, 16 bp, synthetic construct
  source 1..16: mol_type = other DNA
ggacattctgttcttt

SEQ ID NO: 315 - DNA, 16 bp, synthetic construct
  source 1..16: mol_type = other DNA
gacaatagagagggac

SEQ ID NO: 316 - DNA, 16 bp, synthetic construct
  source 1..16: mol_type = other DNA
gcagaaagagggagac

SEQ ID NO: 317 - DNA, 16 bp, synthetic construct
  source 1..16: mol_type = other DNA
gttccccttcatgagc

SEQ ID NO: 318 - DNA, 16 bp, synthetic construct
  source 1..16: mol_type = other DNA
cttgttccccttcatg

SEQ ID NO: 319 - DNA, 16 bp, synthetic construct
  source 1..16: mol_type = other DNA
agtaagctggaggctc

SEQ ID NO: 320 - DNA, 16 bp, synthetic construct
  source 1..16: mol_type = other DNA
tgcaagcactccctcc

SEQ ID NO: 321 - DNA, 16 bp, synthetic construct
  source 1..16: mol_type = other DNA
gaaaagggatgcagct

SEQ ID NO: 322 - DNA, 16 bp, synthetic construct
  source 1..16: mol_type = other DNA
agcattttagcctggg

SEQ ID NO: 323 - DNA, 16 bp, synthetic construct
  source 1..16: mol_type = other DNA
tatacaaaagcactca

SEQ ID NO: 324 - DNA, 16 bp, synthetic construct
  source 1..16: mol_type = other DNA
gaattattcatgaatc

SEQ ID NO: 325 - DNA, 16 bp, synthetic construct
  source 1..16: mol_type = other DNA
tggaatatacgaaggg

SEQ ID NO: 326 - DNA, 16 bp, synthetic construct
  source 1..16: mol_type = other DNA
catattttcaaccaca

SEQ ID NO: 327 - DNA, 16 bp, synthetic construct
  source 1..16: mol_type = other DNA
taatactgcccacctc

SEQ ID NO: 328 - DNA, 16 bp, synthetic construct
  source 1..16: mol_type = other DNA
ttgatttagattcatt

SEQ ID NO: 329 - DNA, 16 bp, synthetic construct
  source 1..16: mol_type = other DNA
acttaaagtgtaatgg

SEQ ID NO: 330 - DNA, 16 bp, synthetic construct
  source 1..16: mol_type = other DNA
tgcctgatccctactt

SEQ ID NO: 331 - DNA, 16 bp, synthetic construct
  source 1..16: mol_type = other DNA
gaaaaatatgtctgtg

SEQ ID NO: 332 - DNA, 16 bp, synthetic construct
  source 1..16: mol_type = other DNA
agccgtgggagccgcc

SEQ ID NO: 333 - DNA, 16 bp, synthetic construct
  source 1..16: mol_type = other DNA
gtccaggacggagcag

SEQ ID NO: 334 - DNA, 16 bp, synthetic construct
  source 1..16: mol_type = other DNA
aagacatccgatcttg

SEQ ID NO: 335 - DNA, 16 bp, synthetic construct
  source 1..16: mol_type = other DNA
cactaaacagaaagca

SEQ ID NO: 336 - DNA, 16 bp, synthetic construct
  source 1..16: mol_type = other DNA
gcataagataagacgg

SEQ ID NO: 337 - DNA, 16 bp, synthetic construct
  source 1..16: mol_type = other DNA
cacaaacctgtgacaa

SEQ ID NO: 338 - DNA, 16 bp, synthetic construct
  source 1..16: mol_type = other DNA
ctcctgccaccctacg

SEQ ID NO: 339 - DNA, 16 bp, synthetic construct
  source 1..16: mol_type = other DNA
ctccctcctgccaccc

SEQ ID NO: 340 - DNA, 16 bp, synthetic construct
  source 1..16: mol_type = other DNA
cacctccctcctgcca

SEQ ID NO: 341 - DNA, 16 bp, synthetic construct
  source 1..16: mol_type = other DNA
acgcacctccctcctg

SEQ ID NO: 342 - DNA, 16 bp, synthetic construct
  source 1..16: mol_type = other DNA
cctacgcacctccctc

SEQ ID NO: 343 - DNA, 16 bp, synthetic construct
  source 1..16: mol_type = other DNA
caccctacgcacctcc

SEQ ID NO: 344 - DNA, 16 bp, synthetic construct
  source 1..16: mol_type = other DNA
tgccaccctacgcacc

SEQ ID NO: 345 - DNA, 16 bp, synthetic construct
  source 1..16: mol_type = other DNA
gaagaatccagatccc

SEQ ID NO: 346 - DNA, 16 bp, synthetic construct
  source 1..16: mol_type = other DNA
aggaagaatccagatc

SEQ ID NO: 347 - DNA, 16 bp, synthetic construct
  source 1..16: mol_type = other DNA
gcgaatttgcctttct

SEQ ID NO: 348 - DNA, 16 bp, synthetic construct
  source 1..16: mol_type = other DNA
tgagaaaatactcagt

SEQ ID NO: 349 - DNA, 16 bp, synthetic construct
  source 1..16: mol_type = other DNA
tctgagatgtagggcc

SEQ ID NO: 350 - DNA, 16 bp, synthetic construct
  source 1..16: mol_type = other DNA
ctccaaccaccacact

SEQ ID NO: 351 - DNA, 16 bp, synthetic construct
  source 1..16: mol_type = other DNA
tggcacagctagcaaa

SEQ ID NO: 352 - DNA, 16 bp, synthetic construct
  source 1..16: mol_type = other DNA
ctttaggctaaaactt

SEQ ID NO: 353 - DNA, 16 bp, synthetic construct
  source 1..16: mol_type = other DNA
cactatgcatgaagaa

SEQ ID NO: 354 - DNA, 16 bp, synthetic construct
  source 1..16: mol_type = other DNA
gacaagtgggctgcct

SEQ ID NO: 355 - DNA, 16 bp, synthetic construct
  source 1..16: mol_type = other DNA
ttaattgttaaaagaa

SEQ ID NO: 356 - DNA, 16 bp, synthetic construct
  source 1..16: mol_type = other DNA
atttaattgttaaaag

SEQ ID NO: 357 - DNA, 16 bp, synthetic construct
  source 1..16: mol_type = other DNA
tatttaattgttaaaa

SEQ ID NO: 358 - DNA, 16 bp, synthetic construct
  source 1..16: mol_type = other DNA
cattatttaattgtta

SEQ ID NO: 359 - DNA, 16 bp, synthetic construct
  source 1..16: mol_type = other DNA
aaagaatggcaagcat

SEQ ID NO: 360 - DNA, 16 bp, synthetic construct
  source 1..16: mol_type = other DNA
ggttgaaggtgtgttt

SEQ ID NO: 361 - DNA, 16 bp, synthetic construct
  source 1..16: mol_type = other DNA
tgtcaaacctgagtgg

SEQ ID NO: 362 - DNA, 16 bp, synthetic construct
  source 1..16: mol_type = other DNA
caacatctcgactgtc

SEQ ID NO: 363 - DNA, 16 bp, synthetic construct
  source 1..16: mol_type = other DNA
gatagagatagcattc

SEQ ID NO: 364 - DNA, 16 bp, synthetic construct
  source 1..16: mol_type = other DNA
acagacaaaaccagtt

SEQ ID NO: 365 - DNA, 16 bp, synthetic construct
  source 1..16: mol_type = other DNA
tggcaatcatagctag

SEQ ID NO: 366 - DNA, 16 bp, synthetic construct
  source 1..16: mol_type = other DNA
cgacgaaaccttgtat

SEQ ID NO: 367 - DNA, 16 bp, synthetic construct
  source 1..16: mol_type = other DNA
aagaatggtaatctgc

SEQ ID NO: 368 - DNA, 16 bp, synthetic construct
  source 1..16: mol_type = other DNA
gccaaaaagcctgaag

SEQ ID NO: 369 - DNA, 16 bp, synthetic construct
  source 1..16: mol_type = other DNA
tcatagccattttatt

SEQ ID NO: 370 - DNA, 16 bp, synthetic construct
  source 1..16: mol_type = other DNA
aaagatttgtacatga

SEQ ID NO: 371 - DNA, 16 bp, synthetic construct
  source 1..16: mol_type = other DNA
atattaagaaggaatg

SEQ ID NO: 372 - DNA, 16 bp, synthetic construct
  source 1..16: mol_type = other DNA
tacgatcattttggaa

SEQ ID NO: 373 - DNA, 16 bp, synthetic construct
  source 1..16: mol_type = other DNA
gaacagacctacattt

SEQ ID NO: 374 - DNA, 16 bp, synthetic construct
  source 1..16: mol_type = other DNA
cagacctacatttttt

SEQ ID NO: 375 - DNA, 16 bp, synthetic construct
  source 1..16: mol_type = other DNA
accgtatgtagtaggc

SEQ ID NO: 376 - DNA, 16 bp, synthetic construct
  source 1..16: mol_type = other DNA
aacaaataatccctag

SEQ ID NO: 377 - DNA, 16 bp, synthetic construct
  source 1..16: mol_type = other DNA
tctagaagatggaaga

SEQ ID NO: 378 - DNA, 16 bp, synthetic construct
  source 1..16: mol_type = other DNA
gaaccataaacactct

SEQ ID NO: 379 - DNA, 16 bp, synthetic construct
  source 1..16: mol_type = other DNA
ctatacaggcaaaaat

SEQ ID NO: 380 - DNA, 16 bp, synthetic construct
  source 1..16: mol_type = other DNA
caaaagtgtgccacca

SEQ ID NO: 381 - DNA, 16 bp, synthetic construct
  source 1..16: mol_type = other DNA
atggattcaacacaat

SEQ ID NO: 382 - DNA, 16 bp, synthetic construct
  source 1..16: mol_type = other DNA
aaattaattgcatttc

SEQ ID NO: 383 - DNA, 16 bp, synthetic construct
  source 1..16: mol_type = other DNA
ttgcatttccgtctca

SEQ ID NO: 384 - DNA, 16 bp, synthetic construct
  source 1..16: mol_type = other DNA
aaaaattaattgcatt

SEQ ID NO: 385 - DNA, 16 bp, synthetic construct
  source 1..16: mol_type = other DNA
aaaaaaattaattgca

SEQ ID NO: 386 - DNA, 16 bp, synthetic construct
  source 1..16: mol_type = other DNA
aaaaaaaattaattgc

SEQ ID NO: 387 - DNA, 16 bp, synthetic construct
  source 1..16: mol_type = other DNA
taacaaactgaacaag

SEQ ID NO: 388 - DNA, 16 bp, synthetic construct
  source 1..16: mol_type = other DNA
tgtttcgggtgcggcc

SEQ ID NO: 389 - DNA, 16 bp, synthetic construct
  source 1..16: mol_type = other DNA
ccaaagactgttctaa

SEQ ID NO: 390 - DNA, 16 bp, synthetic construct
  source 1..16: mol_type = other DNA
acccaccccgcctccc

SEQ ID NO: 391 - DNA, 16 bp, synthetic construct
  source 1..16: mol_type = other DNA
ttagaatctccaactc

SEQ ID NO: 392 - DNA, 16 bp, synthetic construct
  source 1..16: mol_type = other DNA
ggtcaggaaaggagcg

SEQ ID NO: 393 - DNA, 16 bp, synthetic construct
  source 1..16: mol_type = other DNA
ggtgttattttaatta

SEQ ID NO: 394 - DNA, 16 bp, synthetic construct
  source 1..16: mol_type = other DNA
aaaagcttgggcacca

SEQ ID NO: 395 - DNA, 16 bp, synthetic construct
  source 1..16: mol_type = other DNA
caagagctgggactag

SEQ ID NO: 396 - DNA, 16 bp, synthetic construct
  source 1..16: mol_type = other DNA
aaagaatgagtgatct

SEQ ID NO: 397 - DNA, 16 bp, synthetic construct
  source 1..16: mol_type = other DNA
gtcaacaagcatttcc

SEQ ID NO: 398 - DNA, 16 bp, synthetic construct
  source 1..16: mol_type = other DNA
ggcatttttttagtca

SEQ ID NO: 399 - DNA, 16 bp, synthetic construct
  source 1..16: mol_type = other DNA
caagatccatgcttcc

SEQ ID NO: 400 - DNA, 16 bp, synthetic construct
  source 1..16: mol_type = other DNA
ggatgatgtgatacat

SEQ ID NO: 401 - DNA, 16 bp, synthetic construct
  source 1..16: mol_type = other DNA
caatctaagaaatagg

SEQ ID NO: 402 - DNA, 16 bp, synthetic construct
  source 1..16: mol_type = other DNA
tccaaatgcctagaac

SEQ ID NO: 403 - DNA, 16 bp, synthetic construct
  source 1..16: mol_type = other DNA
ggcggactcaggctta

SEQ ID NO: 404 - DNA, 16 bp, synthetic construct
  source 1..16: mol_type = other DNA
tgacagttagaggaac

SEQ ID NO: 405 - DNA, 16 bp, synthetic construct
  source 1..16: mol_type = other DNA
ggaaagcacaggtgtc

SEQ ID NO: 406 - DNA, 16 bp, synthetic construct
  source 1..16: mol_type = other DNA
agggaaagcacaggtg

SEQ ID NO: 407 - DNA, 16 bp, synthetic construct
  source 1..16: mol_type = other DNA
gcatagggaaagcaca

SEQ ID NO: 408 - DNA, 16 bp, synthetic construct
  source 1..16: mol_type = other DNA
gggcatagggaaagca

SEQ ID NO: 409 - DNA, 16 bp, synthetic construct
  source 1..16: mol_type = other DNA
gagggcatagggaaag

SEQ ID NO: 410 - DNA, 16 bp, synthetic construct
  source 1..16: mol_type = other DNA
ggtgagggcataggga

SEQ ID NO: 411 - DNA, 16 bp, synthetic construct
  source 1..16: mol_type = other DNA
atcgggtgagggcata

SEQ ID NO: 412 - DNA, 16 bp, synthetic construct
  source 1..16: mol_type = other DNA
acagagcaaagggagg

SEQ ID NO: 413 - DNA, 16 bp, synthetic construct
  source 1..16: mol_type = other DNA
acacagagcaaaggga

SEQ ID NO: 414 - DNA, 16 bp, synthetic construct
  source 1..16: mol_type = other DNA
gcacacagagcaaagg

SEQ ID NO: 415 - DNA, 16 bp, synthetic construct
  source 1..16: mol_type = other DNA
aggcacacagagcaaa

SEQ ID NO: 416 - DNA, 16 bp, synthetic construct
  source 1..16: mol_type = other DNA
aggcaggcacacagag

SEQ ID NO: 417 - DNA, 16 bp, synthetic construct
  source 1..16: mol_type = other DNA
ggggaggcaggcacac

SEQ ID NO: 418 - DNA, 16 bp, synthetic construct
  source 1..16: mol_type = other DNA
gcacaggtgtccatgg

SEQ ID NO: 419 - DNA, 16 bp, synthetic construct
  source 1..16: mol_type = other DNA
ggaatagttacatgtg

SEQ ID NO: 420 - DNA, 16 bp, synthetic construct
  source 1..16: mol_type = other DNA
acccgatagctggttg

SEQ ID NO: 421 - DNA, 16 bp, synthetic construct
  source 1..16: mol_type = other DNA
tcacactattaattag

SEQ ID NO: 422 - DNA, 16 bp, synthetic construct
  source 1..16: mol_type = other DNA
actgaacgattttaaa

SEQ ID NO: 423 - DNA, 16 bp, synthetic construct
  source 1..16: mol_type = other DNA
ccatgctaaggagtac

SEQ ID NO: 424 - DNA, 16 bp, synthetic construct
  source 1..16: mol_type = other DNA
gtacagggtttctttt

SEQ ID NO: 425 - DNA, 16 bp, synthetic construct
  source 1..16: mol_type = other DNA
ttaaatggtgtgacca

SEQ ID NO: 426 - DNA, 16 bp, synthetic construct
  source 1..16: mol_type = other DNA
acgattacagggattc

SEQ ID NO: 427 - DNA, 16 bp, synthetic construct
  source 1..16: mol_type = other DNA
agctgtattagctcac

SEQ ID NO: 428 - DNA, 16 bp, synthetic construct
  source 1..16: mol_type = other DNA
gttacttacttaatct

SEQ ID NO: 429 - DNA, 16 bp, synthetic construct
  source 1..16: mol_type = other DNA
aacaagtattagatgt

SEQ ID NO: 430 - DNA, 16 bp, synthetic construct
  source 1..16: mol_type = other DNA
gcacagactccagaat

SEQ ID NO: 431 - DNA, 16 bp, synthetic construct
  source 1..16: mol_type = other DNA
cagtataatgtgatgg

SEQ ID NO: 432 - DNA, 16 bp, synthetic construct
  source 1..16: mol_type = other DNA
gagatacacactaagc

SEQ ID NO: 433 - DNA, 16 bp, synthetic construct
  source 1..16: mol_type = other DNA
cagcggtggagaaaca

SEQ ID NO: 434 - DNA, 16 bp, synthetic construct
  source 1..16: mol_type = other DNA
atggaaagcaggcaca

SEQ ID NO: 435 - DNA, 16 bp, synthetic construct
  source 1..16: mol_type = other DNA
aagtataatggtgggt

SEQ ID NO: 436 - DNA, 16 bp, synthetic construct
  source 1..16: mol_type = other DNA
taaaatgtaggatgat

SEQ ID NO: 437 - DNA, 16 bp, synthetic construct
  source 1..16: mol_type = other DNA
actaaagagaagaggg

SEQ ID NO: 438 - DNA, 16 bp, synthetic construct
  source 1..16: mol_type = other DNA
agcaaatcacaggttc

SEQ ID NO: 439 - DNA, 16 bp, synthetic construct
  source 1..16: mol_type = other DNA
cagtaccaagtgtttc

SEQ ID NO: 440 - DNA, 16 bp, synthetic construct
  source 1..16: mol_type = other DNA
aggagatagaggagat

SEQ ID NO: 441 - DNA, 16 bp, synthetic construct
  source 1..16: mol_type = other DNA
cttaaactcctacagg

SEQ ID NO: 442 - DNA, 16 bp, synthetic construct
  source 1..16: mol_type = other DNA
agctcaaggtaagtac

SEQ ID NO: 443 - DNA, 16 bp, synthetic construct
  source 1..16: mol_type = other DNA
tcccagtcagcatcct

SEQ ID NO: 444 - DNA, 16 bp, synthetic construct
  source 1..16: mol_type = other DNA
ccccagggtccaccct

SEQ ID NO: 445 - DNA, 16 bp, synthetic construct
  source 1..16: mol_type = other DNA
ctcacatacacaaccc

SEQ ID NO: 446 - DNA, 16 bp, synthetic construct
  source 1..16: mol_type = other DNA
ctgcaggttgttttta

SEQ ID NO: 447 - DNA, 16 bp, synthetic construct
  source 1..16: mol_type = other DNA
aatggatacagtatgt

SEQ ID NO: 448 - DNA, 16 bp, synthetic construct
  source 1..16: mol_type = other DNA
agtcaaaaggaaagag

SEQ ID NO: 449 - DNA, 16 bp, synthetic construct
  source 1..16: mol_type = other DNA
caaacaactcaactgt

SEQ ID NO: 450 - DNA, 16 bp, synthetic construct
  source 1..16: mol_type = other DNA
agcatgaactccagga

SEQ ID NO: 451 - DNA, 16 bp, synthetic construct
  source 1..16: mol_type = other DNA
aaatgcaacagactgt

SEQ ID NO: 452 - DNA, 16 bp, synthetic construct
  source 1..16: mol_type = other DNA
acccaaatccctacca

SEQ ID NO: 453 - DNA, 16 bp, synthetic construct
  source 1..16: mol_type = other DNA
gatataaattatctca

SEQ ID NO: 454 - DNA, 16 bp, synthetic construct
  source 1..16: mol_type = other DNA
gctaatgagtacaagg

SEQ ID NO: 455 - DNA, 16 bp, synthetic construct
  source 1..16: mol_type = other DNA
accatacggatgaacc

SEQ ID NO: 456 - DNA, 16 bp, synthetic construct
  source 1..16: mol_type = other DNA
tcaaaaaaggttaaac

SEQ ID NO: 457 - DNA, 16 bp, synthetic construct
  source 1..16: mol_type = other DNA
atgtacaatggtgatg

SEQ ID NO: 458 - DNA, 16 bp, synthetic construct
  source 1..16: mol_type = other DNA
aaagaaaaatgggaac

SEQ ID NO: 459 - DNA, 16 bp, synthetic construct
  source 1..16: mol_type = other DNA
ttataatgatgcctta

SEQ ID NO: 460 - DNA, 16 bp, synthetic construct
  source 1..16: mol_type = other DNA
cccaagaggtctccca

SEQ ID NO: 461 - DNA, 16 bp, synthetic construct
  source 1..16: mol_type = other DNA
cataatacccagagaa

SEQ ID NO: 462 - DNA, 16 bp, synthetic construct
  source 1..16: mol_type = other DNA
cactcatacacataat

SEQ ID NO: 463 - DNA, 16 bp, synthetic construct
  source 1..16: mol_type = other DNA
tgtcacccagagaaaa

SEQ ID NO: 464 - DNA, 16 bp, synthetic construct
  source 1..16: mol_type = other DNA
aggtacattgacgatg

SEQ ID NO: 465 - DNA, 16 bp, synthetic construct
  source 1..16: mol_type = other DNA
gacgcagacaggcaag

SEQ ID NO: 466 - DNA, 16 bp, synthetic construct
  source 1..16: mol_type = other DNA
tttagacgcagacagg

SEQ ID NO: 467 - DNA, 16 bp, synthetic construct
  source 1..16: mol_type = other DNA
gtgaactgggagtact

SEQ ID NO: 468 - DNA, 16 bp, synthetic construct
  source 1..16: mol_type = other DNA
ggtgaactgggagtac

SEQ ID NO: 469 - DNA, 16 bp, synthetic construct
  source 1..16: mol_type = other DNA
gcatctcaattaaagg

SEQ ID NO: 470 - DNA, 16 bp, synthetic construct
  source 1..16: mol_type = other DNA
gcgacaggaatctcat

SEQ ID NO: 471 - DNA, 16 bp, synthetic construct
  source 1..16: mol_type = other DNA
ggagcccgcccgctgg

SEQ ID NO: 472 - DNA, 16 bp, synthetic construct
  source 1..16: mol_type = other DNA
caggtgcagcggcctg

SEQ ID NO: 473 - DNA, 16 bp, synthetic construct
  source 1..16: mol_type = other DNA
ccctccatgagacctg

SEQ ID NO: 474 - DNA, 16 bp, synthetic construct
  source 1..16: mol_type = other DNA
cccctccatgagacct

SEQ ID NO: 475 - DNA, 16 bp, synthetic construct
  source 1..16: mol_type = other DNA
tcacgcttgttcccct

SEQ ID NO: 476 - DNA, 16 bp, synthetic construct
  source 1..16: mol_type = other DNA
ctcacgcttgttcccc

SEQ ID NO: 477 - DNA, 16 bp, synthetic construct
  source 1..16: mol_type = other DNA
gtaggagcggtggaac

SEQ ID NO: 478 - DNA, 16 bp, synthetic construct
  source 1..16: mol_type = other DNA
cggtaggagcggtgga

SEQ ID NO: 479 - DNA, 16 bp, synthetic construct
  source 1..16: mol_type = other DNA
catgccaaaggtgcag

SEQ ID NO: 480 - DNA, 16 bp, synthetic construct
  source 1..16: mol_type = other DNA
tcatgccaaaggtgca

SEQ ID NO: 481 - DNA, 16 bp, synthetic construct
  source 1..16: mol_type = other DNA
ctgaagtactctccga

SEQ ID NO: 482 - DNA, 16 bp, synthetic construct
  source 1..16: mol_type = other DNA
gctgaagtactctccg

SEQ ID NO: 483 - DNA, 16 bp, synthetic construct
  source 1..16: mol_type = other DNA
atttccgggtacctgt

SEQ ID NO: 484 - DNA, 16 bp, synthetic construct
  source 1..16: mol_type = other DNA
aatttccgggtacctg

SEQ ID NO: 485 - DNA, 16 bp, synthetic construct
  source 1..16: mol_type = other DNA
cggccacgagagtggt

SEQ ID NO: 486 - DNA, 16 bp, synthetic construct
  source 1..16: mol_type = other DNA
ccggccacgagagtgg

SEQ ID NO: 487 - DNA, 16 bp, synthetic construct
  source 1..16: mol_type = other DNA
ggcagagtcccccgca

SEQ ID NO: 488 - DNA, 16 bp, synthetic construct
  source 1..16: mol_type = other DNA
gcggcagagtcccccg

SEQ ID NO: 489 - DNA, 16 bp, synthetic construct
  source 1..16: mol_type = other DNA
tgttgtcccgcaagct

SEQ ID NO: 490 - DNA, 16 bp, synthetic construct
  source 1..16: mol_type = other DNA
gttgttgtcccgcaag

SEQ ID NO: 491 - DNA, 16 bp, synthetic construct
  source 1..16: mol_type = other DNA
gtccgatttgttctgg

SEQ ID NO: 492 - DNA, 16 bp, synthetic construct
  source 1..16: mol_type = other DNA
agtccgatttgttctg

SEQ ID NO: 493 - DNA, 16 bp, synthetic construct
  source 1..16: mol_type = other DNA
accgcatccacccctg

SEQ ID NO: 494 - DNA, 16 bp, synthetic construct
  source 1..16: mol_type = other DNA
caccgcatccacccct

SEQ ID NO: 495 - DNA, 16 bp, synthetic construct
  source 1..16: mol_type = other DNA
aagatgaagttgccca

SEQ ID NO: 496 - DNA, 16 bp, synthetic construct
  source 1..16: mol_type = other DNA
cgaagatgaagttgcc

SEQ ID NO: 497 - DNA, 16 bp, synthetic construct
  source 1..16: mol_type = other DNA
gtgagagtaattcgcc

SEQ ID NO: 498 - DNA, 16 bp, synthetic construct
  source 1..16: mol_type = other DNA
aagtgagagtaattcg

SEQ ID NO: 499 - DNA, 16 bp, synthetic construct
  source 1..16: mol_type = other DNA
tgctctgcgcgcagca

SEQ ID NO: 500 - DNA, 16 bp, synthetic construct
  source 1..16: mol_type = other DNA
ctgctctgcgcgcagc

SEQ ID NO: 501 - DNA, 16 bp, synthetic construct
  source 1..16: mol_type = other DNA
ggcaggttcatcctgc

SEQ ID NO: 502 - DNA, 16 bp, synthetic construct
  source 1..16: mol_type = other DNA
aaggcaggttcatcct

SEQ ID NO: 503 - DNA, 16 bp, synthetic construct
  source 1..16: mol_type = other DNA
gatggaggtctccacg

SEQ ID NO: 504 - DNA, 16 bp, synthetic construct
  source 1..16: mol_type = other DNA
ttcctcatgctgatgg

SEQ ID NO: 505 - DNA, 16 bp, synthetic construct
  source 1..16: mol_type = other DNA
gggtaaaggttctcaa

SEQ ID NO: 506 - DNA, 16 bp, synthetic construct
  source 1..16: mol_type = other DNA
gaagggtaaaggttct

SEQ ID NO: 507 - DNA, 16 bp, synthetic construct
  source 1..16: mol_type = other DNA
gaagatgtaggcacag

SEQ ID NO: 508 - DNA, 16 bp, synthetic construct
  source 1..16: mol_type = other DNA
tggagcttatagtagc

SEQ ID NO: 509 - DNA, 16 bp, synthetic construct
  source 1..16: mol_type = other DNA
caacctggagcttata

SEQ ID NO: 510 - DNA, 16 bp, synthetic construct
  source 1..16: mol_type = other DNA
agagctggtagctggt

SEQ ID NO: 511 - DNA, 16 bp, synthetic construct
  source 1..16: mol_type = other DNA
cagagagctggtagct

SEQ ID NO: 512 - DNA, 16 bp, synthetic construct
  source 1..16: mol_type = other DNA
acgagctcagccatct

SEQ ID NO: 513 - DNA, 16 bp, synthetic construct
  source 1..16: mol_type = other DNA
gacgagctcagccatc

SEQ ID NO: 514 - DNA, 16 bp, synthetic construct
  source 1..16: mol_type = other DNA
cggcttcggaaccttc

SEQ ID NO: 515 - DNA, 16 bp, synthetic construct
  source 1..16: mol_type = other DNA
ccagggtggcataggc

SEQ ID NO: 516 - DNA, 16 bp, synthetic construct
  source 1..16: mol_type = other DNA
cccagggtggcatagg

SEQ ID NO: 517 - DNA, 16 bp, synthetic construct
  source 1..16: mol_type = other DNA
ccttcaatcttgccag

SEQ ID NO: 518 - DNA, 16 bp, synthetic construct
  source 1..16: mol_type = other DNA
tgggcggctctgagag

SEQ ID NO: 519 - DNA, 16 bp, synthetic construct
  source 1..16: mol_type = other DNA
atcagctactgttctt

SEQ ID NO: 520 - DNA, 16 bp, synthetic construct
  source 1..16: mol_type = other DNA
ctgggcagcttcatca

SEQ ID NO: 521 - DNA, 16 bp, synthetic construct
  source 1..16: mol_type = other DNA
gctgatccaagggaaa

SEQ ID NO: 522 - DNA, 16 bp, synthetic construct
  source 1..16: mol_type = other DNA
ggaaagttccttgtca

SEQ ID NO: 523 - DNA, 16 bp, synthetic construct
  source 1..16: mol_type = other DNA
taggaaagttccttgt

SEQ ID NO: 524 - DNA, 16 bp, synthetic construct
  source 1..16: mol_type = other DNA
ggcaggaaacccgtgc

SEQ ID NO: 525 - DNA, 16 bp, synthetic construct
  source 1..16: mol_type = other DNA
tgggcaggaaacccgt

SEQ ID NO: 526 - DNA, 16 bp, synthetic construct
  source 1..16: mol_type = other DNA
agccctcgggagtcag

SEQ ID NO: 527 - DNA, 16 bp, synthetic construct
  source 1..16: mol_type = other DNA
cctagccctcgggagt

SEQ ID NO: 528 - DNA, 16 bp, synthetic construct
  source 1..16: mol_type = other DNA
gcacgggtatgaggct

SEQ ID NO: 529 - DNA, 16 bp, synthetic construct
  source 1..16: mol_type = other DNA
tgtagaggtatgaaag

SEQ ID NO: 530 - DNA, 16 bp, synthetic construct
  source 1..16: mol_type = other DNA
ataggagttctctggc

SEQ ID NO: 531 - DNA, 16 bp, synthetic construct
  source 1..16: mol_type = other DNA
gaaggcggagtgatca

SEQ ID NO: 532 - DNA, 16 bp, synthetic construct
  source 1..16: mol_type = other DNA
ctacgggagcccagga

SEQ ID NO: 533 - DNA, 16 bp, synthetic construct
  source 1..16: mol_type = other DNA
aacactccagcagatg

SEQ ID NO: 534 - DNA, 16 bp, synthetic construct
  source 1..16: mol_type = other DNA
gcaacactccagcaga

SEQ ID NO: 535 - DNA, 16 bp, synthetic construct
  source 1..16: mol_type = other DNA
gaccgcaaggcactta

SEQ ID NO: 536 - DNA, 16 bp, synthetic construct
  source 1..16: mol_type = other DNA
tgaccgcaaggcactt

SEQ ID NO: 537 - DNA, 16 bp, synthetic construct
  source 1..16: mol_type = other DNA
taaacgggcaagattc

SEQ ID NO: 538 - DNA, 16 bp, synthetic construct
  source 1..16: mol_type = other DNA
ataaacgggcaagatt

SEQ ID NO: 539 - DNA, 16 bp, synthetic construct
  source 1..16: mol_type = other DNA
ttgtcctaatgaagaa

SEQ ID NO: 540 - DNA, 16 bp, synthetic construct
  source 1..16: mol_type = other DNA
tccccttggaagggac

SEQ ID NO: 541 - DNA, 16 bp, synthetic construct
  source 1..16: mol_type = other DNA
aggatctgtgtctcag

SEQ ID NO: 542 - DNA, 16 bp, synthetic construct
  source 1..16: mol_type = other DNA
gtcctagcacctccct

SEQ ID NO: 543 - DNA, 16 bp, synthetic construct
  source 1..16: mol_type = other DNA
ccctagaacggcctct

SEQ ID NO: 544 - DNA, 16 bp, synthetic construct
  source 1..16: mol_type = other DNA
cttccctagaacggcc

SEQ ID NO: 545 - DNA, 16 bp, synthetic construct
  source 1..16: mol_type = other DNA
acccgagtgaggctgc

SEQ ID NO: 546 - DNA, 16 bp, synthetic construct
  source 1..16: mol_type = other DNA
gaacccgagtgaggct

SEQ ID NO: 547 - DNA, 16 bp, synthetic construct
  source 1..16: mol_type = other DNA
ccacacagagcccgtg

SEQ ID NO: 548 - DNA, 16 bp, synthetic construct
  source 1..16: mol_type = other DNA
agccgggaaggcctcc

SEQ ID NO: 549 - DNA, 16 bp, synthetic construct
  source 1..16: mol_type = other DNA
cccaaaaagggctgga

SEQ ID NO: 550 - DNA, 16 bp, synthetic construct
  source 1..16: mol_type = other DNA
gccaagtggtgagcaa

SEQ ID NO: 551 - DNA, 16 bp, synthetic construct
  source 1..16: mol_type = other DNA
gttgaatctggcagcc

SEQ ID NO: 552 - DNA, 16 bp, synthetic construct
  source 1..16: mol_type = other DNA
tgggactggttccttt

SEQ ID NO: 553 - DNA, 16 bp, synthetic construct
  source 1..16: mol_type = other DNA
tggcaaagagcaccga

SEQ ID NO: 554 - DNA, 16 bp, synthetic construct
  source 1..16: mol_type = other DNA
ccagacccaacattgg

SEQ ID NO: 555 - DNA, 16 bp, synthetic construct
  source 1..16: mol_type = other DNA
gtccgtaacgcacctt

SEQ ID NO: 556 - DNA, 16 bp, synthetic construct
  source 1..16: mol_type = other DNA
ctttcttagtccgtaa

SEQ ID NO: 557 - DNA, 16 bp, synthetic construct
  source 1..16: mol_type = other DNA
gactacaaggtcaagt

SEQ ID NO: 558 - DNA, 16 bp, synthetic construct
  source 1..16: mol_type = other DNA
attcactgcgctcccg

SEQ ID NO: 559 - DNA, 16 bp, synthetic construct
  source 1..16: mol_type = other DNA
tcggtaggagtcattc

SEQ ID NO: 560 - DNA, 16 bp, synthetic construct
  source 1..16: mol_type = other DNA
acagaagagcccatgc

SEQ ID NO: 561 - DNA, 16 bp, synthetic construct
  source 1..16: mol_type = other DNA
tcttaccccggtggcc

SEQ ID NO: 562 - DNA, 16 bp, synthetic construct
  source 1..16: mol_type = other DNA
ccctacgcgcctccct

SEQ ID NO: 563 - DNA, 16 bp, synthetic construct
  source 1..16: mol_type = other DNA
ctgccaccctacgcgc

SEQ ID NO: 564 - DNA, 16 bp, synthetic construct
  source 1..16: mol_type = other DNA
gcctaccgcatgaagc

SEQ ID NO: 565 - DNA, 16 bp, synthetic construct
  source 1..16: mol_type = other DNA
gggcataacactagat

SEQ ID NO: 566 - DNA, 16 bp, synthetic construct
  source 1..16: mol_type = other DNA
tggacaaggtttgaca

SEQ ID NO: 567 - DNA, 16 bp, synthetic construct
  source 1..16: mol_type = other DNA
ggttacacccccggcg

SEQ ID NO: 568 - DNA, 16 bp, synthetic construct
  source 1..16: mol_type = other DNA
gctacattaaccaccg

SEQ ID NO: 569 - DNA, 16 bp, synthetic construct
  source 1..16: mol_type = other DNA
ttgaaagagcccccac

SEQ ID NO: 570 - DNA, 16 bp, synthetic construct
  source 1..16: mol_type = other DNA
caggaactatggtatt

SEQ ID NO: 571 - DNA, 16 bp, synthetic construct
  source 1..16: mol_type = other DNA
gcaatcatagctagca

SEQ ID NO: 572 - DNA, 16 bp, synthetic construct
  source 1..16: mol_type = other DNA
tttatgaacagaccta

SEQ ID NO: 573 - DNA, 16 bp, synthetic construct
  source 1..16: mol_type = other DNA
gtaggcactttatgaa

SEQ ID NO: 574 - DNA, 16 bp, synthetic construct
  source 1..16: mol_type = other DNA
gcatagatggtcaact

SEQ ID NO: 575 - DNA, 16 bp, synthetic construct
  source 1..16: mol_type = other DNA
ggagagacaatagatc

SEQ ID NO: 576 - DNA, 16 bp, synthetic construct
  source 1..16: mol_type = other DNA
ggcttgagtgccgctt

SEQ ID NO: 577 - DNA, 16 bp, synthetic construct
  source 1..16: mol_type = other DNA
ccgcaggcgagtgtcg

SEQ ID NO: 578 - DNA, 16 bp, synthetic construct
  source 1..16: mol_type = other DNA
actaatgggaacttcc

SEQ ID NO: 579 - DNA, 16 bp, synthetic construct
  source 1..16: mol_type = other DNA
caagagatttgtccca

SEQ ID NO: 580 - DNA, 16 bp, synthetic construct
  source 1..16: mol_type = other DNA
gagcagcaggagttcg

SEQ ID NO: 581 - DNA, 16 bp, synthetic construct
  source 1..16: mol_type = other DNA
cctcagatccagcagt

SEQ ID NO: 582 - DNA, 16 bp, synthetic construct
  source 1..16: mol_type = other DNA
atacatccagagtcac

SEQ ID NO: 583 - DNA, 16 bp, synthetic construct
  source 1..16: mol_type = other DNA
gatacatccagagtca

SEQ ID NO: 584 - DNA, 16 bp, synthetic construct
  source 1..16: mol_type = other DNA
ctccggaaaataaacg

SEQ ID NO: 585 - DNA, 16 bp, synthetic construct
  source 1..16: mol_type = other DNA
ggagatggctccggaa

SEQ ID NO: 586 - DNA, 16 bp, synthetic construct
  source 1..16: mol_type = other DNA
accatggactttctgt

SEQ ID NO: 587 - DNA, 16 bp, synthetic construct
  source 1..16: mol_type = other DNA
aaccatggactttctg

SEQ ID NO: 588 - DNA, 16 bp, synthetic construct
  source 1..16: mol_type = other DNA
ctaactggaatagtta

SEQ ID NO: 589 - DNA, 16 bp, synthetic construct
  source 1..16: mol_type = other DNA
actaactggaatagtt

SEQ ID NO: 590 - DNA, 16 bp, synthetic construct
  source 1..16: mol_type = other DNA
atcatagtattcagcc

SEQ ID NO: 591 - DNA, 16 bp, synthetic construct
  source 1..16: mol_type = other DNA
aaaaaggtggtgtatc

SEQ ID NO: 592 - DNA, 16 bp, synthetic construct
  source 1..16: mol_type = other DNA
attacagggattcatt

SEQ ID NO: 593 - DNA, 16 bp, synthetic construct
  source 1..16: mol_type = other DNA
cgattacagggattca

SEQ ID NO: 594 - DNA, 16 bp, synthetic construct
  source 1..16: mol_type = other DNA
ggccagtaagagtgaa

SEQ ID NO: 595 - DNA, 16 bp, synthetic construct
  source 1..16: mol_type = other DNA
gaatcagtataatgtg

SEQ ID NO: 596 - DNA, 16 bp, synthetic construct
  source 1..16: mol_type = other DNA
tgcccccatggaaagc

SEQ ID NO: 597 - DNA, 16 bp, synthetic construct
  source 1..16: mol_type = other DNA
ctgcccccatggaaag

SEQ ID NO: 598 - DNA, 16 bp, synthetic construct
  source 1..16: mol_type = other DNA
ctgcagtaggactgca

SEQ ID NO: 599 - DNA, 16 bp, synthetic construct
  source 1..16: mol_type = other DNA
aagcagggagcttctc

SEQ ID NO: 600 - DNA, 16 bp, synthetic construct
  source 1..16: mol_type = other DNA
cgccatggagcaagca

SEQ ID NO: 601 - DNA, 16 bp, synthetic construct
  source 1..16: mol_type = other DNA
tgcaacactgagaggg

SEQ ID NO: 602 - DNA, 16 bp, synthetic construct
  source 1..16: mol_type = other DNA
ggacaattccttgaca

SEQ ID NO: 603 - DNA, 16 bp, synthetic construct
  source 1..16: mol_type = other DNA
gacaatccgctgcctt

SEQ ID NO: 604 - DNA, 16 bp, synthetic construct
  source 1..16: mol_type = other DNA
aggtagggatggacgc

SEQ ID NO: 605 - DNA, 16 bp, synthetic construct
  source 1..16: mol_type = other DNA
gggacttgctaatgag

SEQ ID NO: 606 - DNA, 16 bp, synthetic construct
  source 1..16: mol_type = other DNA
tgggacttgctaatga

SEQ ID NO: 607 - DNA, 16 bp, synthetic construct
  source 1..16: mol_type = other DNA
gtccactaactgataa

SEQ ID NO: 608 - DNA, 16 bp, synthetic construct
  source 1..16: mol_type = other DNA
ggtgatgtcacttcgg

SEQ ID NO: 609 - DNA, 16 bp, synthetic construct
  source 1..16: mol_type = other DNA
cacataatacccagag

SEQ ID NO: 610 - DNA, 16 bp, synthetic construct
  source 1..16: mol_type = other DNA
ggatagggttgtgtca

SEQ ID NO: 611 - DNA, 16 bp, synthetic construct
  source 1..16: mol_type = other DNA
ggcggactctgggcag

SEQ ID NO: 612 - DNA, 16 bp, synthetic construct
  source 1..16: mol_type = other DNA
gaaggcggactctggg

SEQ ID NO: 613 - DNA, 16 bp, synthetic construct
  source 1..16: mol_type = other DNA
agaaggcggactctgg

SEQ ID NO: 614 - DNA, 16 bp, synthetic construct
  source 1..16: mol_type = other DNA
tgagaaggcggactct

SEQ ID NO: 615 - DNA, 16 bp, synthetic construct
  source 1..16: mol_type = other DNA
ctgagaaggcggactc

SEQ ID NO: 616 - DNA, 16 bp, synthetic construct
  source 1..16: mol_type = other DNA
cctgagaaggcggact

SEQ ID NO: 617 - DNA, 16 bp, synthetic construct
  source 1..16: mol_type = other DNA
ggacctgagaaggcgg

SEQ ID NO: 618 - DNA, 16 bp, synthetic construct
  source 1..16: mol_type = other DNA
aaggagggctcccgag

SEQ ID NO: 619 - DNA, 16 bp, synthetic construct
  source 1..16: mol_type = other DNA
gaaggagggctcccga

SEQ ID NO: 620 - DNA, 16 bp, synthetic construct
  source 1..16: mol_type = other DNA
tccgaaggaaggaggg

SEQ ID NO: 621 - DNA, 16 bp, synthetic construct
  source 1..16: mol_type = other DNA
tttccgaaggaaggag

SEQ ID NO: 622 - DNA, 16 bp, synthetic construct
  source 1..16: mol_type = other DNA
gttttccgaaggaagg

SEQ ID NO: 623 - DNA, 16 bp, synthetic construct
  source 1..16: mol_type = other DNA
ggagttttccgaagga

SEQ ID NO: 624 - DNA, 16 bp, synthetic construct
  source 1..16: mol_type = other DNA
ccgggagttttccgaa

SEQ ID NO: 625 - DNA, 16 bp, synthetic construct
  source 1..16: mol_type = other DNA
gccgggagttttccga

SEQ ID NO: 626 - DNA, 16 bp, synthetic construct
  source 1..16: mol_type = other DNA
ggaagcgacaggaatc

SEQ ID NO: 627 - DNA, 16 bp, synthetic construct
  source 1..16: mol_type = other DNA
atggaagcgacaggaa

SEQ ID NO: 628 - DNA, 16 bp, synthetic construct
  source 1..16: mol_type = other DNA
gatggaagcgacagga

SEQ ID NO: 629 - DNA, 16 bp, synthetic construct
  source 1..16: mol_type = other DNA
ggatggaagcgacagg

SEQ ID NO: 630 - DNA, 16 bp, synthetic construct
  source 1..16: mol_type = other DNA
gggatggaagcgacag

SEQ ID NO: 631 - DNA, 16 bp, synthetic construct
  source 1..16: mol_type = other DNA
ccagggatggaagcga

SEQ ID NO: 632 - DNA, 16 bp, synthetic construct
  source 1..16: mol_type = other DNA
gccagggatggaagcg

SEQ ID NO: 633 - DNA, 16 bp, synthetic construct
  source 1..16: mol_type = other DNA
gccggccagggatgga

SEQ ID NO: 634 - DNA, 16 bp, synthetic construct
  source 1..16: mol_type = other DNA
gttcccctgacaggtg

SEQ ID NO: 635 - DNA, 16 bp, synthetic construct
  source 1..16: mol_type = other DNA
ttgttcccctgacagg

SEQ ID NO: 636 - DNA, 16 bp, synthetic construct
  source 1..16: mol_type = other DNA
cttgttcccctgacag

SEQ ID NO: 637 - DNA, 16 bp, synthetic construct
  source 1..16: mol_type = other DNA
gcttgttcccctgaca

SEQ ID NO: 638 - DNA, 16 bp, synthetic construct
  source 1..16: mol_type = other DNA
cagcttgttcccctga

SEQ ID NO: 639 - DNA, 16 bp, synthetic construct
  source 1..16: mol_type = other DNA
ccagcttgttcccctg

SEQ ID NO: 640 - DNA, 16 bp, synthetic construct
  source 1..16: mol_type = other DNA
ctagggtcctgctcct

SEQ ID NO: 641 - DNA, 16 bp, synthetic construct
  source 1..16: mol_type = other DNA
gaggtctagggtcctg

SEQ ID NO: 642 - DNA, 16 bp, synthetic construct
  source 1..16: mol_type = other DNA
cagcttgttcccctcc

SEQ ID NO: 643 - DNA, 16 bp, synthetic construct
  source 1..16: mol_type = other DNA
gctagagtcctgctcc

SEQ ID NO: 644 - DNA, 16 bp, synthetic construct
  source 1..16: mol_type = other DNA
gggctagagtcctgct

SEQ ID NO: 645 - DNA, 16 bp, synthetic construct
  source 1..16: mol_type = other DNA
ggagggctagagtcct

SEQ ID NO: 646 - DNA, 16 bp, synthetic construct
  source 1..16: mol_type = other DNA
actgtggagggctaga

SEQ ID NO: 647 - DNA, 16 bp, synthetic construct
  source 1..16: mol_type = other DNA
gactgtggagggctag

SEQ ID NO: 648 - DNA, 16 bp, synthetic construct
  source 1..16: mol_type = other DNA
ggactgtggagggcta

SEQ ID NO: 649 - DNA, 16 bp, synthetic construct
  source 1..16: mol_type = other DNA
ccctggagtggactgt

SEQ ID NO: 650 - DNA, 16 bp, synthetic construct
  source 1..16: mol_type = other DNA
tgctcctcacgcttgt

SEQ ID NO: 651 - DNA, 16 bp, synthetic construct
  source 1..16: mol_type = other DNA
cctgctcctcacgctt

SEQ ID NO: 652 - DNA, 16 bp, synthetic construct
  source 1..16: mol_type = other DNA
ccctgctcctcacgct

SEQ ID NO: 653 - DNA, 16 bp, synthetic construct
  source 1..16: mol_type = other DNA
gcgccgcaggttcggg

SEQ ID NO: 654 - DNA, 16 bp, synthetic construct
  source 1..16: mol_type = other DNA
tccgccgtgggctgct

SEQ ID NO: 655 - DNA, 16 bp, synthetic construct
  source 1..16: mol_type = other DNA
cctccgccgtgggctg

SEQ ID NO: 656 - DNA, 16 bp, synthetic construct
  source 1..16: mol_type = other DNA
tcctcctccgccgtgg

SEQ ID NO: 657 - DNA, 16 bp, synthetic construct
  source 1..16: mol_type = other DNA
cgatcagggcctcctc

SEQ ID NO: 658 - DNA, 16 bp, synthetic construct
  source 1..16: mol_type = other DNA
gctctcggtaggagcg

SEQ ID NO: 659 - DNA, 16 bp, synthetic construct
  source 1..16: mol_type = other DNA
gagctctcggtaggag

SEQ ID NO: 660 - DNA, 16 bp, synthetic construct
  source 1..16: mol_type = other DNA
gaagagctctcggtag

SEQ ID NO: 661 - DNA, 16 bp, synthetic construct
  source 1..16: mol_type = other DNA
tcgaagagctctcggt

SEQ ID NO: 662 - DNA, 16 bp, synthetic construct
  source 1..16: mol_type = other DNA
aactcgaagagctctc

SEQ ID NO: 663 - DNA, 16 bp, synthetic construct
  source 1..16: mol_type = other DNA
gaactcgaagagctct

SEQ ID NO: 664 - DNA, 16 bp, synthetic construct
  source 1..16: mol_type = other DNA
gttgcagaagaactcg

SEQ ID NO: 665 - DNA, 16 bp, synthetic construct
  source 1..16: mol_type = other DNA
tgttgcagaagaactc

SEQ ID NO: 666 - DNA, 16 bp, synthetic construct
  source 1..16: mol_type = other DNA
gccagtacatcatgcc

SEQ ID NO: 667 - DNA, 16 bp, synthetic construct
  source 1..16: mol_type = other DNA
ttgccagtacatcatg

SEQ ID NO: 668 - DNA, 16 bp, synthetic construct
  source 1..16: mol_type = other DNA
gaattgccagtacatc

SEQ ID NO: 669 - DNA, 16 bp, synthetic construct
  source 1..16: mol_type = other DNA
cgaattgccagtacat

SEQ ID NO: 670 - DNA, 16 bp, synthetic construct
  source 1..16: mol_type = other DNA
ccgaattgccagtaca

SEQ ID NO: 671 - DNA, 16 bp, synthetic construct
  source 1..16: mol_type = other DNA
aggccgaattgccagt

SEQ ID NO: 672 - DNA, 16 bp, synthetic construct
  source 1..16: mol_type = other DNA
gcaggccgaattgcca

SEQ ID NO: 673 - DNA, 16 bp, synthetic construct
  source 1..16: mol_type = other DNA
aagcaggccgaattgc

SEQ ID NO: 674 - DNA, 16 bp, synthetic construct
  source 1..16: mol_type = other DNA
tgttgaggctgacggg

SEQ ID NO: 675 - DNA, 16 bp, synthetic construct
  source 1..16: mol_type = other DNA
gatgttgaggctgacg

SEQ ID NO: 676 - DNA, 16 bp, synthetic construct
  source 1..16: mol_type = other DNA
gagttgaggttgatgt

SEQ ID NO: 677 - DNA, 16 bp, synthetic construct
  source 1..16: mol_type = other DNA
ccgagttgaggttgat

SEQ ID NO: 678 - DNA, 16 bp, synthetic construct
  source 1..16: mol_type = other DNA
gtccgagttgaggttg

SEQ ID NO: 679 - DNA, 16 bp, synthetic construct
  source 1..16: mol_type = other DNA
tgtccgagttgaggtt

SEQ ID NO: 680 - DNA, 16 bp, synthetic construct
  source 1..16: mol_type = other DNA
ttgtccgagttgaggt

SEQ ID NO: 681 - DNA, 16 bp, synthetic construct
  source 1..16: mol_type = other DNA
gcttgtccgagttgag

SEQ ID NO: 682 - DNA, 16 bp, synthetic construct
  source 1..16: mol_type = other DNA
tgcggtccagctcctc

SEQ ID NO: 683 - DNA, 16 bp, synthetic construct
  source 1..16: mol_type = other DNA
tgatgcggtccagctc

SEQ ID NO: 684 - DNA, 16 bp, synthetic construct
  source 1..16: mol_type = other DNA
ctgtgatgcggtccag

SEQ ID NO: 685 - DNA, 16 bp, synthetic construct
  source 1..16: mol_type = other DNA
ctctgtgatgcggtcc

SEQ ID NO: 686 - DNA, 16 bp, synthetic construct
  source 1..16: mol_type = other DNA
gctctgtgatgcggtc

SEQ ID NO: 687 - DNA, 16 bp, synthetic construct
  source 1..16: mol_type = other DNA
tacaggtcaaagagcg

SEQ ID NO: 688 - DNA, 16 bp, synthetic construct
  source 1..16: mol_type = other DNA
tgtacaggtcaaagag

SEQ ID NO: 689 - DNA, 16 bp, synthetic construct
  source 1..16: mol_type = other DNA
ttgtacaggtcaaaga

SEQ ID NO: 690 - DNA, 16 bp, synthetic construct
  source 1..16: mol_type = other DNA
cgggagccggccacga

SEQ ID NO: 691 - DNA, 16 bp, synthetic construct
  source 1..16: mol_type = other DNA
tgcgggagccggccac

SEQ ID NO: 692 - DNA, 16 bp, synthetic construct
  source 1..16: mol_type = other DNA
ggctgcgggagccggc

SEQ ID NO: 693 - DNA, 16 bp, synthetic construct
  source 1..16: mol_type = other DNA
cggctgcgggagccgg

SEQ ID NO: 694 - DNA, 16 bp, synthetic construct
  source 1..16: mol_type = other DNA
acggctgcgggagccg

SEQ ID NO: 695 - DNA, 16 bp, synthetic construct
  source 1..16: mol_type = other DNA
cgacggctgcgggagc

SEQ ID NO: 696 - DNA, 16 bp, synthetic construct
  source 1..16: mol_type = other DNA
gcgacggctgcgggag

SEQ ID NO: 697 - DNA, 16 bp, synthetic construct
  source 1..16: mol_type = other DNA
tcgcgacggctgcggg

SEQ ID NO: 698 - DNA, 16 bp, synthetic construct
  source 1..16: mol_type = other DNA
gggtgcggcagagtcc

SEQ ID NO: 699 - DNA, 16 bp, synthetic construct
  source 1..16: mol_type = other DNA
ggcgggaccctcaggc

SEQ ID NO: 700 - DNA, 16 bp, synthetic construct
  source 1..16: mol_type = other DNA
acgggccccgtgaggc

SEQ ID NO: 701 - DNA, 16 bp, synthetic construct
  source 1..16: mol_type = other DNA
cgacgggccccgtgag

SEQ ID NO: 702 - DNA, 16 bp, synthetic construct
  source 1..16: mol_type = other DNA
gctcgacgggccccgt

SEQ ID NO: 703 - DNA, 16 bp, synthetic construct
  source 1..16: mol_type = other DNA
ggctcgacgggccccg

SEQ ID NO: 704 - DNA, 16 bp, synthetic construct
  source 1..16: mol_type = other DNA
gctacgggctcgacgg

SEQ ID NO: 705 - DNA, 16 bp, synthetic construct
  source 1..16: mol_type = other DNA
acgctacgggctcgac

SEQ ID NO: 706 - DNA, 16 bp, synthetic construct
  source 1..16: mol_type = other DNA
gaagccgatcttccag

SEQ ID NO: 707 - DNA, 16 bp, synthetic construct
  source 1..16: mol_type = other DNA
ggaagccgatcttcca

SEQ ID NO: 708 - DNA, 16 bp, synthetic construct
  source 1..16: mol_type = other DNA
tggaagccgatcttcc

SEQ ID NO: 709 - DNA, 16 bp, synthetic construct
  source 1..16: mol_type = other DNA
gctggaagccgatctt

SEQ ID NO: 710 - DNA, 16 bp, synthetic construct
  source 1..16: mol_type = other DNA
cagctggaagccgatc

SEQ ID NO: 711 - DNA, 16 bp, synthetic construct
  source 1..16: mol_type = other DNA
tctggttgcacagctg

SEQ ID NO: 712 - DNA, 16 bp, synthetic construct
  source 1..16: mol_type = other DNA
ttctggttgcacagct

SEQ ID NO: 713 - DNA, 16 bp, synthetic construct
  source 1..16: mol_type = other DNA
gttctggttgcacagc

SEQ ID NO: 714 - DNA, 16 bp, synthetic construct
  source 1..16: mol_type = other DNA
agcagtccgatttgtt

SEQ ID NO: 715 - DNA, 16 bp, synthetic construct
  source 1..16: mol_type = other DNA
gaagcagtccgatttg

SEQ ID NO: 716 - DNA, 16 bp, synthetic construct
  source 1..16: mol_type = other DNA
agaagcagtccgattt

SEQ ID NO: 717 - DNA, 16 bp, synthetic construct
  source 1..16: mol_type = other DNA
tagaagcagtccgatt

SEQ ID NO: 718 - DNA, 16 bp, synthetic construct
  source 1..16: mol_type = other DNA
gtagaagcagtccgat

SEQ ID NO: 719 - DNA, 16 bp, synthetic construct
  source 1..16: mol_type = other DNA
ggtagaagcagtccga

SEQ ID NO: 720 - DNA, 16 bp, synthetic construct
  source 1..16: mol_type = other DNA
tgtctggtagaagcag

SEQ ID NO: 721 - DNA, 16 bp, synthetic construct
  source 1..16: mol_type = other DNA
atgtctggtagaagca

SEQ ID NO: 722 - DNA, 16 bp, synthetic construct
  source 1..16: mol_type = other DNA
ccctcaccgcatccac

SEQ ID NO: 723 - DNA, 16 bp, synthetic construct
  source 1..16: mol_type = other DNA
actccctcaccgcatc

SEQ ID NO: 724 - DNA, 16 bp, synthetic construct
  source 1..16: mol_type = other DNA
cactccctcaccgcat

SEQ ID NO: 725 - DNA, 16 bp, synthetic construct
  source 1..16: mol_type = other DNA
accactccctcaccgc

SEQ ID NO: 726 - DNA, 16 bp, synthetic construct
  source 1..16: mol_type = other DNA
cggtaccactccctca

SEQ ID NO: 727 - DNA, 16 bp, synthetic construct
  source 1..16: mol_type = other DNA
gcggtaccactccctc

SEQ ID NO: 728 - DNA, 16 bp, synthetic construct
  source 1..16: mol_type = other DNA
agcggtaccactccct

SEQ ID NO: 729 - DNA, 16 bp, synthetic construct
  source 1..16: mol_type = other DNA
gatgtagtggaagcgg

SEQ ID NO: 730 - DNA, 16 bp, synthetic construct
  source 1..16: mol_type = other DNA
gcggcaggcgaagatg

SEQ ID NO: 731 - DNA, 16 bp, synthetic construct
  source 1..16: mol_type = other DNA
gaagcggcaggcgaag

SEQ ID NO: 732 - DNA, 16 bp, synthetic construct
  source 1..16: mol_type = other DNA
gttgaagcggcaggcg

SEQ ID NO: 733 - DNA, 16 bp, synthetic construct
  source 1..16: mol_type = other DNA
ggttgaagcggcaggc

SEQ ID NO: 734 - DNA, 16 bp, synthetic construct
  source 1..16: mol_type = other DNA
acctggttgaagcggc

SEQ ID NO: 735 - DNA, 16 bp, synthetic construct
  source 1..16: mol_type = other DNA
agacctggttgaagcg

SEQ ID NO: 736 - DNA, 16 bp, synthetic construct
  source 1..16: mol_type = other DNA
ggagacctggttgaag

SEQ ID NO: 737 - DNA, 16 bp, synthetic construct
  source 1..16: mol_type = other DNA
tggttgcaggagacct

SEQ ID NO: 738 - DNA, 16 bp, synthetic construct
  source 1..16: mol_type = other DNA
aagacatccagaggtt

SEQ ID NO: 739 - DNA, 16 bp, synthetic construct
  source 1..16: mol_type = other DNA
tgttgattccaggcat

SEQ ID NO: 740 - DNA, 16 bp, synthetic construct
  source 1..16: mol_type = other DNA
ttgttgattccaggca

SEQ ID NO: 741 - DNA, 16 bp, synthetic construct
  source 1..16: mol_type = other DNA
gttgttgattccaggc

SEQ ID NO: 742 - DNA, 16 bp, synthetic construct
  source 1..16: mol_type = other DNA
ccgttgttgattccag

SEQ ID NO: 743 - DNA, 16 bp, synthetic construct
  source 1..16: mol_type = other DNA
accgttgttgattcca

SEQ ID NO: 744 - DNA, 16 bp, synthetic construct
  source 1..16: mol_type = other DNA
agaccgttgttgattc

SEQ ID NO: 745 - DNA, 16 bp, synthetic construct
  source 1..16: mol_type = other DNA
acagaccgttgttgat

SEQ ID NO: 746 - DNA, 16 bp, synthetic construct
  source 1..16: mol_type = other DNA
attctgctctgcgcgc

SEQ ID NO: 747 - DNA, 16 bp, synthetic construct
  source 1..16: mol_type = other DNA
cattctgctctgcgcg

SEQ ID NO: 748 - DNA, 16 bp, synthetic construct
  source 1..16: mol_type = other DNA
tcattctgctctgcgc

SEQ ID NO: 749 - DNA, 16 bp, synthetic construct
  source 1..16: mol_type = other DNA
cgggccccagtcactg

SEQ ID NO: 750 - DNA, 16 bp, synthetic construct
  source 1..16: mol_type = other DNA
cccgggccccagtcac

SEQ ID NO: 751 - DNA, 16 bp, synthetic construct
  source 1..16: mol_type = other DNA
tacccgggccccagtc

SEQ ID NO: 752 - DNA, 16 bp, synthetic construct
  source 1..16: mol_type = other DNA
attacccgggccccag

SEQ ID NO: 753 - DNA, 16 bp, synthetic construct
  source 1..16: mol_type = other DNA
ccattacccgggcccc

SEQ ID NO: 754 - DNA, 16 bp, synthetic construct
  source 1..16: mol_type = other DNA
atcatccataaaggca

SEQ ID NO: 755 - DNA, 16 bp, synthetic construct
  source 1..16: mol_type = other DNA
agttaaagccaccatc

SEQ ID NO: 756 - DNA, 16 bp, synthetic construct
  source 1..16: mol_type = other DNA
cgcaagttaaagccac

SEQ ID NO: 757 - DNA, 16 bp, synthetic construct
  source 1..16: mol_type = other DNA
gccgcaagttaaagcc

SEQ ID NO: 758 - DNA, 16 bp, synthetic construct
  source 1..16: mol_type = other DNA
aggccgcaagttaaag

SEQ ID NO: 759 - DNA, 16 bp, synthetic construct
  source 1..16: mol_type = other DNA
caggccgcaagttaaa

SEQ ID NO: 760 - DNA, 16 bp, synthetic construct
  source 1..16: mol_type = other DNA
ccaggccgcaagttaa

SEQ ID NO: 761 - DNA, 16 bp, synthetic construct
  source 1..16: mol_type = other DNA
gccaggccgcaagtta

SEQ ID NO: 762 - DNA, 16 bp, synthetic construct
  source 1..16: mol_type = other DNA
taatcgcccccaagtc

SEQ ID NO: 763 - DNA, 16 bp, synthetic construct
  source 1..16: mol_type = other DNA
ataatcgcccccaagt

SEQ ID NO: 764 - DNA, 16 bp, synthetic construct
  source 1..16: mol_type = other DNA
cataatcgcccccaag

SEQ ID NO: 765 - DNA, 16 bp, synthetic construct
  source 1..16: mol_type = other DNA
gccataatcgccccca

SEQ ID NO: 766 - DNA, 16 bp, synthetic construct
  source 1..16: mol_type = other DNA
cgccataatcgccccc

SEQ ID NO: 767 - DNA, 16 bp, synthetic construct
  source 1..16: mol_type = other DNA
gtcgccataatcgccc

SEQ ID NO: 768 - DNA, 16 bp, synthetic construct
  source 1..16: mol_type = other DNA
tgcagtcgccataatc

SEQ ID NO: 769 - DNA, 16 bp, synthetic construct
  source 1..16: mol_type = other DNA
gtgcagtcgccataat

SEQ ID NO: 770 - DNA, 16 bp, synthetic construct
  source 1..16: mol_type = other DNA
gtgaatacacacctgc

SEQ ID NO: 771 - DNA, 16 bp, synthetic construct
  source 1..16: mol_type = other DNA
gagtgaatacacacct

SEQ ID NO: 772 - DNA, 16 bp, synthetic construct
  source 1..16: mol_type = other DNA
ggagtgaatacacacc

SEQ ID NO: 773 - DNA, 16 bp, synthetic construct
  source 1..16: mol_type = other DNA
gcaggagtgaatacac

SEQ ID NO: 774 - DNA, 16 bp, synthetic construct
  source 1..16: mol_type = other DNA
tgatcatgctctcctg

SEQ ID NO: 775 - DNA, 16 bp, synthetic construct
  source 1..16: mol_type = other DNA
ttgatcatgctctcct

SEQ ID NO: 776 - DNA, 16 bp, synthetic construct
  source 1..16: mol_type = other DNA
ccttgatcatgctctc

SEQ ID NO: 777 - DNA, 16 bp, synthetic construct
  source 1..16: mol_type = other DNA
tccttgatcatgctct

SEQ ID NO: 778 - DNA, 16 bp, synthetic construct
  source 1..16: mol_type = other DNA
gatagaagatgtaggc

SEQ ID NO: 779 - DNA, 16 bp, synthetic construct
  source 1..16: mol_type = other DNA
ggatagaagatgtagg

SEQ ID NO: 780 - DNA, 16 bp, synthetic construct
  source 1..16: mol_type = other DNA
cggatagaagatgtag

SEQ ID NO: 781 - DNA, 16 bp, synthetic construct
  source 1..16: mol_type = other DNA
cgcggatagaagatgt

SEQ ID NO: 782 - DNA, 16 bp, synthetic construct
  source 1..16: mol_type = other DNA
ccgcggatagaagatg

SEQ ID NO: 783 - DNA, 16 bp, synthetic construct
  source 1..16: mol_type = other DNA
gccgcggatagaagat

SEQ ID NO: 784 - DNA, 16 bp, synthetic construct
  source 1..16: mol_type = other DNA
gggccgcggatagaag

SEQ ID NO: 785 - DNA, 16 bp, synthetic construct
  source 1..16: mol_type = other DNA
gtcacagtactccacg

SEQ ID NO: 786 - DNA, 16 bp, synthetic construct
  source 1..16: mol_type = other DNA
ggagaagtcaacctgg

SEQ ID NO: 787 - DNA, 16 bp, synthetic construct
  source 1..16: mol_type = other DNA
gtctgaggagaagtca

SEQ ID NO: 788 - DNA, 16 bp, synthetic construct
  source 1..16: mol_type = other DNA
cttggtgaaacagccc

SEQ ID NO: 789 - DNA, 16 bp, synthetic construct
  source 1..16: mol_type = other DNA
ccggcacttggtgaaa

SEQ ID NO: 790 - DNA, 16 bp, synthetic construct
  source 1..16: mol_type = other DNA
tggcttccggcacttg

SEQ ID NO: 791 - DNA, 16 bp, synthetic construct
  source 1..16: mol_type = other DNA
atggcttccggcactt

SEQ ID NO: 792 - DNA, 16 bp, synthetic construct
  source 1..16: mol_type = other DNA
gcatggcttccggcac

SEQ ID NO: 793 - DNA, 16 bp, synthetic construct
  source 1..16: mol_type = other DNA
acgctgcatggcttcc

SEQ ID NO: 794 - DNA, 16 bp, synthetic construct
  source 1..16: mol_type = other DNA
tttgtagttcagctcc

SEQ ID NO: 795 - DNA, 16 bp, synthetic construct
  source 1..16: mol_type = other DNA
aggtcaaagacgagct

SEQ ID NO: 796 - DNA, 16 bp, synthetic construct
  source 1..16: mol_type = other DNA
caggtcaaagacgagc

SEQ ID NO: 797 - DNA, 16 bp, synthetic construct
  source 1..16: mol_type = other DNA
gcaggtcaaagacgag

SEQ ID NO: 798 - DNA, 16 bp, synthetic construct
  source 1..16: mol_type = other DNA
tgaccagcaggtcaaa

SEQ ID NO: 799 - DNA, 16 bp, synthetic construct
  source 1..16: mol_type = other DNA
gatgaccagcaggtca

SEQ ID NO: 800 - DNA, 16 bp, synthetic construct
  source 1..16: mol_type = other DNA
tcggagcagcatgagg

SEQ ID NO: 801 - DNA, 16 bp, synthetic construct
  source 1..16: mol_type = other DNA
cttcggagcagcatga

SEQ ID NO: 802 - DNA, 16 bp, synthetic construct
  source 1..16: mol_type = other DNA
ccttcggagcagcatg

SEQ ID NO: 803 - DNA, 16 bp, synthetic construct
  source 1..16: mol_type = other DNA
tatcggcttcggaacc

SEQ ID NO: 804 - DNA, 16 bp, synthetic construct
  source 1..16: mol_type = other DNA
gtatcggcttcggaac

SEQ ID NO: 805 - DNA, 16 bp, synthetic construct
  source 1..16: mol_type = other DNA
agtatcggcttcggaa

SEQ ID NO: 806 - DNA, 16 bp, synthetic construct
  source 1..16: mol_type = other DNA
ccagtatcggcttcgg

SEQ ID NO: 807 - DNA, 16 bp, synthetic construct
  source 1..16: mol_type = other DNA
accagtatcggcttcg

SEQ ID NO: 808 - DNA, 16 bp, synthetic construct
  source 1..16: mol_type = other DNA
gaccagtatcggcttc

SEQ ID NO: 809 - DNA, 16 bp, synthetic construct
  source 1..16: mol_type = other DNA
agaccagtatcggctt

SEQ ID NO: 810 - DNA, 16 bp, synthetic construct
  source 1..16: mol_type = other DNA
ggagaccagtatcggc

SEQ ID NO: 811 - DNA, 16 bp, synthetic construct
  source 1..16: mol_type = other DNA
agggcccccccagagg

SEQ ID NO: 812 - DNA, 16 bp, synthetic construct
  source 1..16: mol_type = other DNA
tcagggcccccccaga

SEQ ID NO: 813 - DNA, 16 bp, synthetic construct
  source 1..16: mol_type = other DNA
gtgtgagaaacctctc

SEQ ID NO: 814 - DNA, 16 bp, synthetic construct
  source 1..16: mol_type = other DNA
tggtgtgagaaacctc

SEQ ID NO: 815 - DNA, 16 bp, synthetic construct
  source 1..16: mol_type = other DNA
ccttggtgtgagaaac

SEQ ID NO: 816 - DNA, 16 bp, synthetic construct
  source 1..16: mol_type = other DNA
gccttggtgtgagaaa

SEQ ID NO: 817 - DNA, 16 bp, synthetic construct
  source 1..16: mol_type = other DNA
tgccttggtgtgagaa

SEQ ID NO: 818 - DNA, 16 bp, synthetic construct
  source 1..16: mol_type = other DNA
ctgccttggtgtgaga

SEQ ID NO: 819 - DNA, 16 bp, synthetic construct
  source 1..16: mol_type = other DNA
acggcagtttgggcgg

SEQ ID NO: 820 - DNA, 16 bp, synthetic construct
  source 1..16: mol_type = other DNA
aacggcagtttgggcg

SEQ ID NO: 821 - DNA, 16 bp, synthetic construct
  source 1..16: mol_type = other DNA
caacggcagtttgggc

SEQ ID NO: 822 - DNA, 16 bp, synthetic construct
  source 1..16: mol_type = other DNA
atcaacggcagtttgg

SEQ ID NO: 823 - DNA, 16 bp, synthetic construct
  source 1..16: mol_type = other DNA
acatcaacggcagttt

SEQ ID NO: 824 - DNA, 16 bp, synthetic construct
  source 1..16: mol_type = other DNA
acacatcaacggcagt

SEQ ID NO: 825 - DNA, 16 bp, synthetic construct
  source 1..16: mol_type = other DNA
cacacatcaacggcag

SEQ ID NO: 826 - DNA, 16 bp, synthetic construct
  source 1..16: mol_type = other DNA
tccacacatcaacggc

SEQ ID NO: 827 - DNA, 16 bp, synthetic construct
  source 1..16: mol_type = other DNA
ggagccaaggcacttc

SEQ ID NO: 828 - DNA, 16 bp, synthetic construct
  source 1..16: mol_type = other DNA
tggagccaaggcactt

SEQ ID NO: 829 - DNA, 16 bp, synthetic construct
  source 1..16: mol_type = other DNA
ggtacagggctggagc

SEQ ID NO: 830 - DNA, 16 bp, synthetic construct
  source 1..16: mol_type = other DNA
tcagaggcagtaccaa

SEQ ID NO: 831 - DNA, 16 bp, synthetic construct
  source 1..16: mol_type = other DNA
tgttcagaggcagtac

SEQ ID NO: 832 - DNA, 16 bp, synthetic construct
  source 1..16: mol_type = other DNA
gaaaccagagtgttca

SEQ ID NO: 833 - DNA, 16 bp, synthetic construct
  source 1..16: mol_type = other DNA
tagccgcagttgggtg

SEQ ID NO: 834 - DNA, 16 bp, synthetic construct
  source 1..16: mol_type = other DNA
ttagccgcagttgggt

SEQ ID NO: 835 - DNA, 16 bp, synthetic construct
  source 1..16: mol_type = other DNA
cttggctgatccaagg

SEQ ID NO: 836 - DNA, 16 bp, synthetic construct
  source 1..16: mol_type = other DNA
gcttggctgatccaag

SEQ ID NO: 837 - DNA, 16 bp, synthetic construct
  source 1..16: mol_type = other DNA
cgcttggctgatccaa

SEQ ID NO: 838 - DNA, 16 bp, synthetic construct
  source 1..16: mol_type = other DNA
tcgcttggctgatcca

SEQ ID NO: 839 - DNA, 16 bp, synthetic construct
  source 1..16: mol_type = other DNA
ttcgcttggctgatcc

SEQ ID NO: 840 - DNA, 16 bp, synthetic construct
  source 1..16: mol_type = other DNA
tttcgcttggctgatc

SEQ ID NO: 841 - DNA, 16 bp, synthetic construct
  source 1..16: mol_type = other DNA
gtttcgcttggctgat

SEQ ID NO: 842 - DNA, 16 bp, synthetic construct
  source 1..16: mol_type = other DNA
agtttcgcttggctga

SEQ ID NO: 843 - DNA, 16 bp, synthetic construct
  source 1..16: mol_type = other DNA
cagcggtttcttagga

SEQ ID NO: 844 - DNA, 16 bp, synthetic construct
  source 1..16: mol_type = other DNA
atcagcggtttcttag

SEQ ID NO: 845 - DNA, 16 bp, synthetic construct
  source 1..16: mol_type = other DNA
ttatcagcggtttctt

SEQ ID NO: 846 - DNA, 16 bp, synthetic construct
  source 1..16: mol_type = other DNA
ggttatcagcggtttc

SEQ ID NO: 847 - DNA, 16 bp, synthetic construct
  source 1..16: mol_type = other DNA
cctggttatcagcggt

SEQ ID NO: 848 - DNA, 16 bp, synthetic construct
  source 1..16: mol_type = other DNA
gtcctggttatcagcg

SEQ ID NO: 849 - DNA, 16 bp, synthetic construct
  source 1..16: mol_type = other DNA
ttgtcctggttatcag

SEQ ID NO: 850 - DNA, 16 bp, synthetic construct
  source 1..16: mol_type = other DNA
tacccttggttgtgtt

SEQ ID NO: 851 - DNA, 16 bp, synthetic construct
  source 1..16: mol_type = other DNA
taagccgtcgctgggc

SEQ ID NO: 852 - DNA, 16 bp, synthetic construct
  source 1..16: mol_type = other DNA
ttaagccgtcgctggg

SEQ ID NO: 853 - DNA, 16 bp, synthetic construct
  source 1..16: mol_type = other DNA
ggcttaagccgtcgct

SEQ ID NO: 854 - DNA, 16 bp, synthetic construct
  source 1..16: mol_type = other DNA
ctggcttaagccgtcg

SEQ ID NO: 855 - DNA, 16 bp, synthetic construct
  source 1..16: mol_type = other DNA
ggctggcttaagccgt

SEQ ID NO: 856 - DNA, 16 bp, synthetic construct
  source 1..16: mol_type = other DNA
gggctggcttaagccg

SEQ ID NO: 857 - DNA, 16 bp, synthetic construct
  source 1..16: mol_type = other DNA
gctactggagagcagt

SEQ ID NO: 858 - DNA, 16 bp, synthetic construct
  source 1..16: mol_type = other DNA
tgctactggagagcag

SEQ ID NO: 859 - DNA, 16 bp, synthetic construct
  source 1..16: mol_type = other DNA
tctgctctagccctag

SEQ ID NO: 860 - DNA, 16 bp, synthetic construct
  source 1..16: mol_type = other DNA
gtctgctctagcccta

SEQ ID NO: 861 - DNA, 16 bp, synthetic construct
  source 1..16: mol_type = other DNA
cgggtctgctctagcc

SEQ ID NO: 862 - DNA, 16 bp, synthetic construct
  source 1..16: mol_type = other DNA
cccgggtctgctctag

SEQ ID NO: 863 - DNA, 16 bp, synthetic construct
  source 1..16: mol_type = other DNA
tacccgggtctgctct

SEQ ID NO: 864 - DNA, 16 bp, synthetic construct
  source 1..16: mol_type = other DNA
ttacccgggtctgctc

SEQ ID NO: 865 - DNA, 16 bp, synthetic construct
  source 1..16: mol_type = other DNA
cttacccgggtctgct

SEQ ID NO: 866 - DNA, 16 bp, synthetic construct
  source 1..16: mol_type = other DNA
tacttacccgggtctg

SEQ ID NO: 867 - DNA, 16 bp, synthetic construct
  source 1..16: mol_type = other DNA
agacatgtagaggtat

SEQ ID NO: 868 - DNA, 16 bp, synthetic construct
  source 1..16: mol_type = other DNA
cagacatgtagaggta

SEQ ID NO: 869 - DNA, 16 bp, synthetic construct
  source 1..16: mol_type = other DNA
caagcagacatgtaga

SEQ ID NO: 870 - DNA, 16 bp, synthetic construct
  source 1..16: mol_type = other DNA
tcaagcagacatgtag

SEQ ID NO: 871 - DNA, 16 bp, synthetic construct
  source 1..16: mol_type = other DNA
ctcaagcagacatgta

SEQ ID NO: 872 - DNA, 16 bp, synthetic construct
  source 1..16: mol_type = other DNA
atctcaagcagacatg

SEQ ID NO: 873 - DNA, 16 bp, synthetic construct
  source 1..16: mol_type = other DNA
tatctcaagcagacat

SEQ ID NO: 874 - DNA, 16 bp, synthetic construct
  source 1..16: mol_type = other DNA
atatctcaagcagaca

SEQ ID NO: 875 - DNA, 16 bp, synthetic construct
  source 1..16: mol_type = other DNA
atgcataggagttctc

SEQ ID NO: 876 - DNA, 16 bp, synthetic construct
  source 1..16: mol_type = other DNA
gatgcataggagttct

SEQ ID NO: 877 - DNA, 16 bp, synthetic construct
  source 1..16: mol_type = other DNA
gggatgcataggagtt

SEQ ID NO: 878 - DNA, 16 bp, synthetic construct
  source 1..16: mol_type = other DNA
aagggatgcataggag

SEQ ID NO: 879 - DNA, 16 bp, synthetic construct
  source 1..16: mol_type = other DNA
taagggatgcatagga

SEQ ID NO: 880 - DNA, 16 bp, synthetic construct
  source 1..16: mol_type = other DNA
ctaagggatgcatagg

SEQ ID NO: 881 - DNA, 16 bp, synthetic construct
  source 1..16: mol_type = other DNA
tctaagggatgcatag

SEQ ID NO: 882 - DNA, 16 bp, synthetic construct
  source 1..16: mol_type = other DNA
gttctaagggatgcat

SEQ ID NO: 883 - DNA, 16 bp, synthetic construct
  source 1..16: mol_type = other DNA
tgtgctacgggagccc

SEQ ID NO: 884 - DNA, 16 bp, synthetic construct
  source 1..16: mol_type = other DNA
gtgtgctacgggagcc

SEQ ID NO: 885 - DNA, 16 bp, synthetic construct
  source 1..16: mol_type = other DNA
agtgtgctacgggagc

SEQ ID NO: 886 - DNA, 16 bp, synthetic construct
  source 1..16: mol_type = other DNA
tagtgtgctacgggag

SEQ ID NO: 887 - DNA, 16 bp, synthetic construct
  source 1..16: mol_type = other DNA
atagtgtgctacggga

SEQ ID NO: 888 - DNA, 16 bp, synthetic construct
  source 1..16: mol_type = other DNA
tatagtgtgctacggg

SEQ ID NO: 889 - DNA, 16 bp, synthetic construct
  source 1..16: mol_type = other DNA
gttatagtgtgctacg

SEQ ID NO: 890 - DNA, 16 bp, synthetic construct
  source 1..16: mol_type = other DNA
gtgcaacagcaacact

SEQ ID NO: 891 - DNA, 16 bp, synthetic construct
  source 1..16: mol_type = other DNA
ggtgcaacagcaacac

SEQ ID NO: 892 - DNA, 16 bp, synthetic construct
  source 1..16: mol_type = other DNA
tggtgcaacagcaaca

SEQ ID NO: 893 - DNA, 16 bp, synthetic construct
  source 1..16: mol_type = other DNA
atggtgcaacagcaac

SEQ ID NO: 894 - DNA, 16 bp, synthetic construct
  source 1..16: mol_type = other DNA
tatggtgcaacagcaa

SEQ ID NO: 895 - DNA, 16 bp, synthetic construct
  source 1..16: mol_type = other DNA
gtatggtgcaacagca

SEQ ID NO: 896 - DNA, 16 bp, synthetic construct
  source 1..16: mol_type = other DNA
agtatggtgcaacagc

SEQ ID NO: 897 - DNA, 16 bp, synthetic construct
  source 1..16: mol_type = other DNA
ccctgaccgcaaggca

SEQ ID NO: 898 - DNA, 16 bp, synthetic construct
  source 1..16: mol_type = other DNA
tccctgaccgcaaggc

SEQ ID NO: 899 - DNA, 16 bp, synthetic construct
  source 1..16: mol_type = other DNA
gtccctgaccgcaagg

SEQ ID NO: 900 - DNA, 16 bp, synthetic construct
  source 1..16: mol_type = other DNA
agtccctgaccgcaag

SEQ ID NO: 901 - DNA, 16 bp, synthetic construct
  source 1..16: mol_type = other DNA
cagtccctgaccgcaa

SEQ ID NO: 902 - DNA, 16 bp, synthetic construct
  source 1..16: mol_type = other DNA
ttcagtccctgaccgc

SEQ ID NO: 903 - DNA, 16 bp, synthetic construct
  source 1..16: mol_type = other DNA
attcagtccctgaccg

SEQ ID NO: 904 - DNA, 16 bp, synthetic construct
  source 1..16: mol_type = other DNA
agattcagtccctgac

SEQ ID NO: 905 - DNA, 16 bp, synthetic construct
  source 1..16: mol_type = other DNA
tacataaacgggcaag

SEQ ID NO: 906 - DNA, 16 bp, synthetic construct
  source 1..16: mol_type = other DNA
gcatacataaacgggc

SEQ ID NO: 907 - DNA, 16 bp, synthetic construct
  source 1..16: mol_type = other DNA
gagcatacataaacgg

SEQ ID NO: 908 - DNA, 16 bp, synthetic construct
  source 1..16: mol_type = other DNA
acatggagcatacata

SEQ ID NO: 909 - DNA, 16 bp, synthetic construct
  source 1..16: mol_type = other DNA
gacatggagcatacat

SEQ ID NO: 910 - DNA, 16 bp, synthetic construct
  source 1..16: mol_type = other DNA
agacatggagcataca

SEQ ID NO: 911 - DNA, 16 bp, synthetic construct
  source 1..16: mol_type = other DNA
ctagacatggagcata

SEQ ID NO: 912 - DNA, 16 bp, synthetic construct
  source 1..16: mol_type = other DNA
gctagacatggagcat

SEQ ID NO: 913 - DNA, 16 bp, synthetic construct
  source 1..16: mol_type = other DNA
tgatacctccccttgg

SEQ ID NO: 914 - DNA, 16 bp, synthetic construct
  source 1..16: mol_type = other DNA
atgatacctccccttg

SEQ ID NO: 915 - DNA, 16 bp, synthetic construct
  source 1..16: mol_type = other DNA
gctcatgatacctccc

SEQ ID NO: 916 - DNA, 16 bp, synthetic construct
  source 1..16: mol_type = other DNA
actgctcatgatacct

SEQ ID NO: 917 - DNA, 16 bp, synthetic construct
  source 1..16: mol_type = other DNA
atactgctcatgatac

SEQ ID NO: 918 - DNA, 16 bp, synthetic construct
  source 1..16: mol_type = other DNA
gatactgctcatgata

SEQ ID NO: 919 - DNA, 16 bp, synthetic construct
  source 1..16: mol_type = other DNA
cttgatactgctcatg

SEQ ID NO: 920 - DNA, 16 bp, synthetic construct
  source 1..16: mol_type = other DNA
ccttgatactgctcat

SEQ ID NO: 921 - DNA, 16 bp, synthetic construct
  source 1..16: mol_type = other DNA
cgagttttgtcctagc

SEQ ID NO: 922 - DNA, 16 bp, synthetic construct
  source 1..16: mol_type = other DNA
tcgagttttgtcctag

SEQ ID NO: 923 - DNA, 16 bp, synthetic construct
  source 1..16: mol_type = other DNA
ctttcgagttttgtcc

SEQ ID NO: 924 - DNA, 16 bp, synthetic construct
  source 1..16: mol_type = other DNA
cacctttcgagttttg

SEQ ID NO: 925 - DNA, 16 bp, synthetic construct
  source 1..16: mol_type = other DNA
gccacctttcgagttt

SEQ ID NO: 926 - DNA, 16 bp, synthetic construct
  source 1..16: mol_type = other DNA
gggccacctttcgagt

SEQ ID NO: 927 - DNA, 16 bp, synthetic construct
  source 1..16: mol_type = other DNA
tagggccacctttcga

SEQ ID NO: 928 - DNA, 16 bp, synthetic construct
  source 1..16: mol_type = other DNA
atagggccacctttcg

SEQ ID NO: 929 - DNA, 16 bp, synthetic construct
  source 1..16: mol_type = other DNA
gccggagctgggcttc

SEQ ID NO: 930 - DNA, 16 bp, synthetic construct
  source 1..16: mol_type = other DNA
tgccggagctgggctt

SEQ ID NO: 931 - DNA, 16 bp, synthetic construct
  source 1..16: mol_type = other DNA
gtgccggagctgggct

SEQ ID NO: 932 - DNA, 16 bp, synthetic construct
  source 1..16: mol_type = other DNA
aagtgccggagctggg

SEQ ID NO: 933 - DNA, 16 bp, synthetic construct
  source 1..16: mol_type = other DNA
aaaagtgccggagctg

SEQ ID NO: 934 - DNA, 16 bp, synthetic construct
  source 1..16: mol_type = other DNA
ccaaaagtgccggagc

SEQ ID NO: 935 - DNA, 16 bp, synthetic construct
  source 1..16: mol_type = other DNA
gccaaaagtgccggag

SEQ ID NO: 936 - DNA, 16 bp, synthetic construct
  source 1..16: mol_type = other DNA
ggccaaaagtgccgga

SEQ ID NO: 937 - DNA, 16 bp, synthetic construct
  source 1..16: mol_type = other DNA
cccctggaacccgagt

SEQ ID NO: 938 - DNA, 16 bp, synthetic construct
  source 1..16: mol_type = other DNA
cacccctggaacccga

SEQ ID NO: 939 - DNA, 16 bp, synthetic construct
  source 1..16: mol_type = other DNA
cccggagtggattggg

SEQ ID NO: 940 - DNA, 16 bp, synthetic construct
  source 1..16: mol_type = other DNA
gccccggagtggattg

SEQ ID NO: 941 - DNA, 16 bp, synthetic construct
  source 1..16: mol_type = other DNA
gagccccggagtggat

SEQ ID NO: 942 - DNA, 16 bp, synthetic construct
  source 1..16: mol_type = other DNA
atgagccccggagtgg

SEQ ID NO: 943 - DNA, 16 bp, synthetic construct
  source 1..16: mol_type = other DNA
ttcatgagccccggag

SEQ ID NO: 944 - DNA, 16 bp, synthetic construct
  source 1..16: mol_type = other DNA
ccttcatgagccccgg

SEQ ID NO: 945 - DNA, 16 bp, synthetic construct
  source 1..16: mol_type = other DNA
tgcttaccttgatact

SEQ ID NO: 946 - DNA, 16 bp, synthetic construct
  source 1..16: mol_type = other DNA
ccaaaccaggttccct

SEQ ID NO: 947 - DNA, 16 bp, synthetic construct
  source 1..16: mol_type = other DNA
agccggtgtcaaccag

SEQ ID NO: 948 - DNA, 16 bp, synthetic construct
  source 1..16: mol_type = other DNA
aaagtgaaagccggtg

SEQ ID NO: 949 - DNA, 16 bp, synthetic construct
  source 1..16: mol_type = other DNA
tgcgacttcttaaagt

SEQ ID NO: 950 - DNA, 16 bp, synthetic construct
  source 1..16: mol_type = other DNA
gctcagggtccaacct

SEQ ID NO: 951 - DNA, 16 bp, synthetic construct
  source 1..16: mol_type = other DNA
agcaaggagtttagca

SEQ ID NO: 952 - DNA, 16 bp, synthetic construct
  source 1..16: mol_type = other DNA
cataagagccaagggc

SEQ ID NO: 953 - DNA, 16 bp, synthetic construct
  source 1..16: mol_type = other DNA
cgttgatgggctatat

SEQ ID NO: 954 - DNA, 16 bp, synthetic construct
  source 1..16: mol_type = other DNA
cgcctagacaggccct

SEQ ID NO: 955 - DNA, 16 bp, synthetic construct
  source 1..16: mol_type = other DNA
acgcaggacactgtgg

SEQ ID NO: 956 - DNA, 16 bp, synthetic construct
  source 1..16: mol_type = other DNA
aggcagcgcgagggcc

SEQ ID NO: 957 - DNA, 16 bp, synthetic construct
  source 1..16: mol_type = other DNA
gtgtaatcgcccctgc

SEQ ID NO: 958 - DNA, 16 bp, synthetic construct
  source 1..16: mol_type = other DNA
ggccctaggacattct

SEQ ID NO: 959 - DNA, 16 bp, synthetic construct
  source 1..16: mol_type = other DNA
gtccagacccgggagg

SEQ ID NO: 960 - DNA, 16 bp, synthetic construct
  source 1..16: mol_type = other DNA
gggagcagcgcactca

SEQ ID NO: 961 - DNA, 16 bp, synthetic construct
  source 1..16: mol_type = other DNA
gggactaaccgacctg

SEQ ID NO: 962 - DNA, 16 bp, synthetic construct
  source 1..16: mol_type = other DNA
ttccaggcgcaggcac

SEQ ID NO: 963 - DNA, 16 bp, synthetic construct
  source 1..16: mol_type = other DNA
cagtaagctggaggct

SEQ ID NO: 964 - DNA, 16 bp, synthetic construct
  source 1..16: mol_type = other DNA
cgccagtccagtaagc

SEQ ID NO: 965 - DNA, 16 bp, synthetic construct
  source 1..16: mol_type = other DNA
gctaggatggctccac

SEQ ID NO: 966 - DNA, 16 bp, synthetic construct
  source 1..16: mol_type = other DNA
ccacactctgggtgag

SEQ ID NO: 967 - DNA, 16 bp, synthetic construct
  source 1..16: mol_type = other DNA
gggcaatgctgctcca

SEQ ID NO: 968 - DNA, 16 bp, synthetic construct
  source 1..16: mol_type = other DNA
tcccacttgcaggagg

SEQ ID NO: 969 - DNA, 16 bp, synthetic construct
  source 1..16: mol_type = other DNA
tcccaaggtgtggcat

SEQ ID NO: 970 - DNA, 16 bp, synthetic construct
  source 1..16: mol_type = other DNA
ttgaagcaggtgttcc

SEQ ID NO: 971 - DNA, 16 bp, synthetic construct
  source 1..16: mol_type = other DNA
tgccaggtgcctagcc

SEQ ID NO: 972 - DNA, 16 bp, synthetic construct
  source 1..16: mol_type = other DNA
caataaagggcttatg

SEQ ID NO: 973 - DNA, 16 bp, synthetic construct
  source 1..16: mol_type = other DNA
aactacctggccttca

SEQ ID NO: 974 - DNA, 16 bp, synthetic construct
  source 1..16: mol_type = other DNA
ggcttatatgcctgtc

SEQ ID NO: 975 - DNA, 16 bp, synthetic construct
  source 1..16: mol_type = other DNA
tgccacagttactggc

SEQ ID NO: 976 - DNA, 16 bp, synthetic construct
  source 1..16: mol_type = other DNA
acttatcccagtgtgc

SEQ ID NO: 977 - DNA, 16 bp, synthetic construct
  source 1..16: mol_type = other DNA
aggaaatggtccctac

SEQ ID NO: 978 - DNA, 16 bp, synthetic construct
  source 1..16: mol_type = other DNA
gtgcacacggcagctt

SEQ ID NO: 979 - DNA, 16 bp, synthetic construct
  source 1..16: mol_type = other DNA
cccaagacaccttcgc

SEQ ID NO: 980 - DNA, 16 bp, synthetic construct
  source 1..16: mol_type = other DNA
tagcaccgggcttgta

SEQ ID NO: 981 - DNA, 16 bp, synthetic construct
  source 1..16: mol_type = other DNA
aacaggatgagtcaca

SEQ ID NO: 982 - DNA, 16 bp, synthetic construct
  source 1..16: mol_type = other DNA
agttttgggattaggc

SEQ ID NO: 983 - DNA, 16 bp, synthetic construct
  source 1..16: mol_type = other DNA
ggcggaagccacatct

SEQ ID NO: 984 - DNA, 16 bp, synthetic construct
  source 1..16: mol_type = other DNA
tgaaatgaggcggaag

SEQ ID NO: 985 - DNA, 16 bp, synthetic construct
  source 1..16: mol_type = other DNA
gggaataatactgccc

SEQ ID NO: 986 - DNA, 16 bp, synthetic construct
  source 1..16: mol_type = other DNA
aatgtatgttcccttg

SEQ ID NO: 987 - DNA, 16 bp, synthetic construct
  source 1..16: mol_type = other DNA
gtaaaaagtctggccc

SEQ ID NO: 988 - DNA, 16 bp, synthetic construct
  source 1..16: mol_type = other DNA
tccaaggtgtgttgtg

SEQ ID NO: 989 - DNA, 16 bp, synthetic construct
  source 1..16: mol_type = other DNA
catgagacctacttcc

SEQ ID NO: 990 - DNA, 16 bp, synthetic construct
  source 1..16: mol_type = other DNA
ataagagtcatcatga

SEQ ID NO: 991 - DNA, 16 bp, synthetic construct
  source 1..16: mol_type = other DNA
ggtgagggtggacggt

SEQ ID NO: 992 - DNA, 16 bp, synthetic construct
  source 1..16: mol_type = other DNA
ggctttccattggagc

SEQ ID NO: 993 - DNA, 16 bp, synthetic construct
  source 1..16: mol_type = other DNA
cctcagcaggtaggca

SEQ ID NO: 994 - DNA, 16 bp, synthetic construct
  source 1..16: mol_type = other DNA
tcggactcagcacttc

SEQ ID NO: 995 - DNA, 16 bp, synthetic construct
  source 1..16: mol_type = other DNA
ctgcagtggccaaccc

SEQ ID NO: 996 - DNA, 16 bp, synthetic construct
  source 1..16: mol_type = other DNA
ctgtaggtatgactgg

SEQ ID NO: 997 - DNA, 16 bp, synthetic construct
  source 1..16: mol_type = other DNA
ttccatgactgtaggt

SEQ ID NO: 998 - DNA, 16 bp, synthetic construct
  source 1..16: mol_type = other DNA
gcctaaaccgttcctg

SEQ ID NO: 999 - DNA, 16 bp, synthetic construct
  source 1..16: mol_type = other DNA
ttcaagaaccccaagt

SEQ ID NO: 1000 - DNA, 16 bp, synthetic construct
  source 1..16: mol_type = other DNA
agaagctaccatgacc

SEQ ID NO: 1001 - DNA, 16 bp, synthetic construct
  source 1..16: mol_type = other DNA
ggcctatcaactaggc

SEQ ID NO: 1002 - DNA, 16 bp, synthetic construct
  source 1..16: mol_type = other DNA
cacaattccatcgggc

SEQ ID NO: 1003 - DNA, 16 bp, synthetic construct
  source 1..16: mol_type = other DNA
ccctacattggagggt

SEQ ID NO: 1004 - DNA, 16 bp, synthetic construct
  source 1..16: mol_type = other DNA
agggataaagaatgcc

SEQ ID NO: 1005 - DNA, 16 bp, synthetic construct
  source 1..16: mol_type = other DNA
gaccagcggctggagg

SEQ ID NO: 1006 - DNA, 16 bp, synthetic construct
  source 1..16: mol_type = other DNA
agacatccgatcttgt

SEQ ID NO: 1007 - DNA, 16 bp, synthetic construct
  source 1..16: mol_type = other DNA
tgacacctagagctaa

SEQ ID NO: 1008 - DNA, 16 bp, synthetic construct
  source 1..16: mol_type = other DNA
ggcagagcctttgagt

SEQ ID NO: 1009 - DNA, 16 bp, synthetic construct
  source 1..16: mol_type = other DNA
tacgcacctccctcct

SEQ ID NO: 1010 - DNA, 16 bp, synthetic construct
  source 1..16: mol_type = other DNA
ctacgcacctccctcc

SEQ ID NO: 1011 - DNA, 16 bp, synthetic construct
  source 1..16: mol_type = other DNA
ccctacgcacctccct

SEQ ID NO: 1012 - DNA, 16 bp, synthetic construct
  source 1..16: mol_type = other DNA
accctacgcacctccc

SEQ ID NO: 1013 - DNA, 16 bp, synthetic construct
  source 1..16: mol_type = other DNA
ccaccctacgcacctc

SEQ ID NO: 1014 - DNA, 16 bp, synthetic construct
  source 1..16: mol_type = other DNA
gccaccctacgcacct

SEQ ID NO: 1015 - DNA, 16 bp, synthetic construct
  source 1..16: mol_type = other DNA
ctgccaccctacgcac

SEQ ID NO: 1016 - DNA, 16 bp, synthetic construct
  source 1..16: mol_type = other DNA
cctgccaccctacgca

SEQ ID NO: 1017 - DNA, 16 bp, synthetic construct
  source 1..16: mol_type = other DNA
ccacatggtgccccag

SEQ ID NO: 1018 - DNA, 16 bp, synthetic construct
  source 1..16: mol_type = other DNA
ttttaggagggccaca

SEQ ID NO: 1019 - DNA, 16 bp, synthetic construct
  source 1..16: mol_type = other DNA
gccctctggtccgtcc

SEQ ID NO: 1020 - DNA, 16 bp, synthetic construct
  source 1..16: mol_type = other DNA
ggtcagacagcactcc

SEQ ID NO: 1021 - DNA, 16 bp, synthetic construct
  source 1..16: mol_type = other DNA
agctagcaaatgggtc

SEQ ID NO: 1022 - DNA, 16 bp, synthetic construct
  source 1..16: mol_type = other DNA
ttccagttggcacagc

SEQ ID NO: 1023 - DNA, 16 bp, synthetic construct
  source 1..16: mol_type = other DNA
cacaattgtcattccc

SEQ ID NO: 1024 - DNA, 16 bp, synthetic construct
  source 1..16: mol_type = other DNA
tgttagctaacacaat

SEQ ID NO: 1025 - DNA, 16 bp, synthetic construct
  source 1..16: mol_type = other DNA
cccacagaaaacggaa

SEQ ID NO: 1026 - DNA, 16 bp, synthetic construct
  source 1..16: mol_type = other DNA
ggctgctgcatgattc

SEQ ID NO: 1027 - DNA, 16 bp, synthetic construct
  source 1..16: mol_type = other DNA
accagaatagattcac

SEQ ID NO: 1028 - DNA, 16 bp, synthetic construct
  source 1..16: mol_type = other DNA
tcgaatcgagtgcccc

SEQ ID NO: 1029 - DNA, 16 bp, synthetic construct
  source 1..16: mol_type = other DNA
aacaatgaacctcgaa

SEQ ID NO: 1030 - DNA, 16 bp, synthetic construct
  source 1..16: mol_type = other DNA
tggtattagaatgtac

SEQ ID NO: 1031 - DNA, 16 bp, synthetic construct
  source 1..16: mol_type = other DNA
gtggtattagaatgta

SEQ ID NO: 1032 - DNA, 16 bp, synthetic construct
  source 1..16: mol_type = other DNA
tgtggtattagaatgt

SEQ ID NO: 1033 - DNA, 16 bp, synthetic construct
  source 1..16: mol_type = other DNA
gtgcagggtcttactt

SEQ ID NO: 1034 - DNA, 16 bp, synthetic construct
  source 1..16: mol_type = other DNA
aaataccagtgcaggg

SEQ ID NO: 1035 - DNA, 16 bp, synthetic construct
  source 1..16: mol_type = other DNA
gtacatcaattatgcc

SEQ ID NO: 1036 - DNA, 16 bp, synthetic construct
  source 1..16: mol_type = other DNA
gggcactcaagatttg

SEQ ID NO: 1037 - DNA, 16 bp, synthetic construct
  source 1..16: mol_type = other DNA
caaacctgagtgggca

SEQ ID NO: 1038 - DNA, 16 bp, synthetic construct
  source 1..16: mol_type = other DNA
ctcgactgtcaaacct

SEQ ID NO: 1039 - DNA, 16 bp, synthetic construct
  source 1..16: mol_type = other DNA
gttcaacatctcgact

SEQ ID NO: 1040 - DNA, 16 bp, synthetic construct
  source 1..16: mol_type = other DNA
gtaatgggagtgttca

SEQ ID NO: 1041 - DNA, 16 bp, synthetic construct
  source 1..16: mol_type = other DNA
gttgaaggtgtgtgtt

SEQ ID NO: 1042 - DNA, 16 bp, synthetic construct
  source 1..16: mol_type = other DNA
agcaactcaaaggtgt

SEQ ID NO: 1043 - DNA, 16 bp, synthetic construct
  source 1..16: mol_type = other DNA
agatttgtacatgagg

SEQ ID NO: 1044 - DNA, 16 bp, synthetic construct
  source 1..16: mol_type = other DNA
acccgaaacacattag

SEQ ID NO: 1045 - DNA, 16 bp, synthetic construct
  source 1..16: mol_type = other DNA
gtttaggccgcacccg

SEQ ID NO: 1046 - DNA, 16 bp, synthetic construct
  source 1..16: mol_type = other DNA
atttacggtgtttagg

SEQ ID NO: 1047 - DNA, 16 bp, synthetic construct
  source 1..16: mol_type = other DNA
gggatttacagtgagc

SEQ ID NO: 1048 - DNA, 16 bp, synthetic construct
  source 1..16: mol_type = other DNA
aaagcatatgccccca

SEQ ID NO: 1049 - DNA, 16 bp, synthetic construct
  source 1..16: mol_type = other DNA
aaccgtatgtagtagg

SEQ ID NO: 1050 - DNA, 16 bp, synthetic construct
  source 1..16: mol_type = other DNA
caaccgtatgtagtag

SEQ ID NO: 1051 - DNA, 16 bp, synthetic construct
  source 1..16: mol_type = other DNA
acaaccgtatgtagta

SEQ ID NO: 1052 - DNA, 16 bp, synthetic construct
  source 1..16: mol_type = other DNA
aacaaccgtatgtagt

SEQ ID NO: 1053 - DNA, 16 bp, synthetic construct
  source 1..16: mol_type = other DNA
gaacaaccgtatgtag

SEQ ID NO: 1054 - DNA, 16 bp, synthetic construct
  source 1..16: mol_type = other DNA
agaacaaccgtatgta

SEQ ID NO: 1055 - DNA, 16 bp, synthetic construct
  source 1..16: mol_type = other DNA
tagaacaaccgtatgt

SEQ ID NO: 1056 - DNA, 16 bp, synthetic construct
  source 1..16: mol_type = other DNA
tgacatactgcttcta

SEQ ID NO: 1057 - DNA, 16 bp, synthetic construct
  source 1..16: mol_type = other DNA
ccccagcaggtatttt

SEQ ID NO: 1058 - DNA, 16 bp, synthetic construct
  source 1..16: mol_type = other DNA
cccaagcaatcaccag

SEQ ID NO: 1059 - DNA, 16 bp, synthetic construct
  source 1..16: mol_type = other DNA
gaccaaaagtgtgcca

SEQ ID NO: 1060 - DNA, 16 bp, synthetic construct
  source 1..16: mol_type = other DNA
gacacaatcgccgctc

SEQ ID NO: 1061 - DNA, 16 bp, synthetic construct
  source 1..16: mol_type = other DNA
gaataagtggagatat

SEQ ID NO: 1062 - DNA, 16 bp, synthetic construct
  source 1..16: mol_type = other DNA
tgcatttccgtctcaa

SEQ ID NO: 1063 - DNA, 16 bp, synthetic construct
  source 1..16: mol_type = other DNA
gggtatcgagaccacc

SEQ ID NO: 1064 - DNA, 16 bp, synthetic construct
  source 1..16: mol_type = other DNA
ccggacctagaaggga

SEQ ID NO: 1065 - DNA, 16 bp, synthetic construct
  source 1..16: mol_type = other DNA
ggccacggcgagccca

SEQ ID NO: 1066 - DNA, 16 bp, synthetic construct
  source 1..16: mol_type = other DNA
gtaaacaggtgtgtcc

SEQ ID NO: 1067 - DNA, 16 bp, synthetic construct
  source 1..16: mol_type = other DNA
ctggagcgagtgtctg

SEQ ID NO: 1068 - DNA, 16 bp, synthetic construct
  source 1..16: mol_type = other DNA
gcggagcccatgggtg

SEQ ID NO: 1069 - DNA, 16 bp, synthetic construct
  source 1..16: mol_type = other DNA
tgtcactgggctgcgc

SEQ ID NO: 1070 - DNA, 16 bp, synthetic construct
  source 1..16: mol_type = other DNA
ccgcgagcccacgagg

SEQ ID NO: 1071 - DNA, 16 bp, synthetic construct
  source 1..16: mol_type = other DNA
caccaagaggtgttat

SEQ ID NO: 1072 - DNA, 16 bp, synthetic construct
  source 1..16: mol_type = other DNA
atttatacctcccctg

SEQ ID NO: 1073 - DNA, 16 bp, synthetic construct
  source 1..16: mol_type = other DNA
cacacacggttttggt

SEQ ID NO: 1074 - DNA, 16 bp, synthetic construct
  source 1..16: mol_type = other DNA
gaccagtagctgcaca

SEQ ID NO: 1075 - DNA, 16 bp, synthetic construct
  source 1..16: mol_type = other DNA
attaagggagttgcag

SEQ ID NO: 1076 - DNA, 16 bp, synthetic construct
  source 1..16: mol_type = other DNA
ccctaggagcatggac

SEQ ID NO: 1077 - DNA, 16 bp, synthetic construct
  source 1..16: mol_type = other DNA
gcagaagtccctagga

SEQ ID NO: 1078 - DNA, 16 bp, synthetic construct
  source 1..16: mol_type = other DNA
acaggagtcggaagcc

SEQ ID NO: 1079 - DNA, 16 bp, synthetic construct
  source 1..16: mol_type = other DNA
gggataagccccttgg

SEQ ID NO: 1080 - DNA, 16 bp, synthetic construct
  source 1..16: mol_type = other DNA
agatccatgcttccag

SEQ ID NO: 1081 - DNA, 16 bp, synthetic construct
  source 1..16: mol_type = other DNA
aagatccatgcttcca

SEQ ID NO: 1082 - DNA, 16 bp, synthetic construct
  source 1..16: mol_type = other DNA
ccaagatccatgcttc

SEQ ID NO: 1083 - DNA, 16 bp, synthetic construct
  source 1..16: mol_type = other DNA
accaagatccatgctt

SEQ ID NO: 1084 - DNA, 16 bp, synthetic construct
  source 1..16: mol_type = other DNA
gaccaagatccatgct

SEQ ID NO: 1085 - DNA, 16 bp, synthetic construct
  source 1..16: mol_type = other DNA
agaccaagatccatgc

SEQ ID NO: 1086 - DNA, 16 bp, synthetic construct
  source 1..16: mol_type = other DNA
aagaccaagatccatg

SEQ ID NO: 1087 - DNA, 16 bp, synthetic construct
  source 1..16: mol_type = other DNA
aggatgatgtgataca

SEQ ID NO: 1088 - DNA, 16 bp, synthetic construct
  source 1..16: mol_type = other DNA
aaggatgatgtgatac

SEQ ID NO: 1089 - DNA, 16 bp, synthetic construct
  source 1..16: mol_type = other DNA
atctaagaaataggct

SEQ ID NO: 1090 - DNA, 16 bp, synthetic construct
  source 1..16: mol_type = other DNA
cacatagcccagatag

SEQ ID NO: 1091 - DNA, 16 bp, synthetic construct
  source 1..16: mol_type = other DNA
tgccaaaggagcatgg

SEQ ID NO: 1092 - DNA, 16 bp, synthetic construct
  source 1..16: mol_type = other DNA
cttgagtaaaagtgcc

SEQ ID NO: 1093 - DNA, 16 bp, synthetic construct
  source 1..16: mol_type = other DNA
gtacagctcttgagat

SEQ ID NO: 1094 - DNA, 16 bp, synthetic construct
  source 1..16: mol_type = other DNA
ggtaagaagtgacacc

SEQ ID NO: 1095 - DNA, 16 bp, synthetic construct
  source 1..16: mol_type = other DNA
gtgtactgggcagagt

SEQ ID NO: 1096 - DNA, 16 bp, synthetic construct
  source 1..16: mol_type = other DNA
tgctaccatcttactt

SEQ ID NO: 1097 - DNA, 16 bp, synthetic construct
  source 1..16: mol_type = other DNA
ggcttaggtgttgcta

SEQ ID NO: 1098 - DNA, 16 bp, synthetic construct
  source 1..16: mol_type = other DNA
gcggactcaggcttag

SEQ ID NO: 1099 - DNA, 16 bp, synthetic construct
  source 1..16: mol_type = other DNA
tgacaggtgtgggcgg

SEQ ID NO: 1100 - DNA, 16 bp, synthetic construct
  source 1..16: mol_type = other DNA
gtgacaggtgtgggcg

SEQ ID NO: 1101 - DNA, 16 bp, synthetic construct
  source 1..16: mol_type = other DNA
gtccaggtgacagtta

SEQ ID NO: 1102 - DNA, 16 bp, synthetic construct
  source 1..16: mol_type = other DNA
cccaggcgagcaatga

SEQ ID NO: 1103 - DNA, 16 bp, synthetic construct
  source 1..16: mol_type = other DNA
ggtataacaacccagg

SEQ ID NO: 1104 - DNA, 16 bp, synthetic construct
  source 1..16: mol_type = other DNA
cagtagggtggagtgg

SEQ ID NO: 1105 - DNA, 16 bp, synthetic construct
  source 1..16: mol_type = other DNA
gtacaaaggttcctgt

SEQ ID NO: 1106 - DNA, 16 bp, synthetic construct
  source 1..16: mol_type = other DNA
cgtgaagtaaggttga

SEQ ID NO: 1107 - DNA, 16 bp, synthetic construct
  source 1..16: mol_type = other DNA
gttacatgtggtgacg

SEQ ID NO: 1108 - DNA, 16 bp, synthetic construct
  source 1..16: mol_type = other DNA
agttacatgtggtgac

SEQ ID NO: 1109 - DNA, 16 bp, synthetic construct
  source 1..16: mol_type = other DNA
tagttacatgtggtga

SEQ ID NO: 1110 - DNA, 16 bp, synthetic construct
  source 1..16: mol_type = other DNA
aggactaactggaata

SEQ ID NO: 1111 - DNA, 16 bp, synthetic construct
  source 1..16: mol_type = other DNA
caggactaactggaat

SEQ ID NO: 1112 - DNA, 16 bp, synthetic construct
  source 1..16: mol_type = other DNA
gcccggtgagatattc

SEQ ID NO: 1113 - DNA, 16 bp, synthetic construct
  source 1..16: mol_type = other DNA
cccgatagctggttgt

SEQ ID NO: 1114 - DNA, 16 bp, synthetic construct
  source 1..16: mol_type = other DNA
ttaattagttcacccg

SEQ ID NO: 1115 - DNA, 16 bp, synthetic construct
  source 1..16: mol_type = other DNA
agtgaatcctcacact

SEQ ID NO: 1116 - DNA, 16 bp, synthetic construct
  source 1..16: mol_type = other DNA
cctagctgggaggtgt

SEQ ID NO: 1117 - DNA, 16 bp, synthetic construct
  source 1..16: mol_type = other DNA
catgttggaggtgatc

SEQ ID NO: 1118 - DNA, 16 bp, synthetic construct
  source 1..16: mol_type = other DNA
tcataggtaaacaccc

SEQ ID NO: 1119 - DNA, 16 bp, synthetic construct
  source 1..16: mol_type = other DNA
gaaaagtctggtagct

SEQ ID NO: 1120 - DNA, 16 bp, synthetic construct
  source 1..16: mol_type = other DNA
tggtgtgaccatttgg

SEQ ID NO: 1121 - DNA, 16 bp, synthetic construct
  source 1..16: mol_type = other DNA
atggtgtgaccatttg

SEQ ID NO: 1122 - DNA, 16 bp, synthetic construct
  source 1..16: mol_type = other DNA
aaatggtgtgaccatt

SEQ ID NO: 1123 - DNA, 16 bp, synthetic construct
  source 1..16: mol_type = other DNA
taaatggtgtgaccat

SEQ ID NO: 1124 - DNA, 16 bp, synthetic construct
  source 1..16: mol_type = other DNA
gttaaatggtgtgacc

SEQ ID NO: 1125 - DNA, 16 bp, synthetic construct
  source 1..16: mol_type = other DNA
gtacgattacagggat

SEQ ID NO: 1126 - DNA, 16 bp, synthetic construct
  source 1..16: mol_type = other DNA
agtacgattacaggga

SEQ ID NO: 1127 - DNA, 16 bp, synthetic construct
  source 1..16: mol_type = other DNA
tagtacgattacaggg

SEQ ID NO: 1128 - DNA, 16 bp, synthetic construct
  source 1..16: mol_type = other DNA
ctagtacgattacagg

SEQ ID NO: 1129 - DNA, 16 bp, synthetic construct
  source 1..16: mol_type = other DNA
actagtacgattacag

SEQ ID NO: 1130 - DNA, 16 bp, synthetic construct
  source 1..16: mol_type = other DNA
cactagtacgattaca

SEQ ID NO: 1131 - DNA, 16 bp, synthetic construct
  source 1..16: mol_type = other DNA
tcactagtacgattac

SEQ ID NO: 1132 - DNA, 16 bp, synthetic construct
  source 1..16: mol_type = other DNA
ctcactagtacgatta

SEQ ID NO: 1133 - DNA, 16 bp, synthetic construct
  source 1..16: mol_type = other DNA
cctatgagaatcagta

SEQ ID NO: 1134 - DNA, 16 bp, synthetic construct
  source 1..16: mol_type = other DNA
gcctatgagaatcagt

SEQ ID NO: 1135 - DNA, 16 bp, synthetic construct
  source 1..16: mol_type = other DNA
ctatagtggcctatga

SEQ ID NO: 1136 - DNA, 16 bp, synthetic construct
  source 1..16: mol_type = other DNA
gatacacactaagcac

SEQ ID NO: 1137 - DNA, 16 bp, synthetic construct
  source 1..16: mol_type = other DNA
agatacacactaagca

SEQ ID NO: 1138 - DNA, 16 bp, synthetic construct
  source 1..16: mol_type = other DNA
gcacactacagcgaga

SEQ ID NO: 1139 - DNA, 16 bp, synthetic construct
  source 1..16: mol_type = other DNA
aaacatagagcttcga

SEQ ID NO: 1140 - DNA, 16 bp, synthetic construct
  source 1..16: mol_type = other DNA
ggtgagcccttcgcac

SEQ ID NO: 1141 - DNA, 16 bp, synthetic construct
  source 1..16: mol_type = other DNA
tgaaggagaggctaca

SEQ ID NO: 1142 - DNA, 16 bp, synthetic construct
  source 1..16: mol_type = other DNA
attctaggatgtactg

SEQ ID NO: 1143 - DNA, 16 bp, synthetic construct
  source 1..16: mol_type = other DNA
gtgacatactggtgca

SEQ ID NO: 1144 - DNA, 16 bp, synthetic construct
  source 1..16: mol_type = other DNA
gggatattccactggc

SEQ ID NO: 1145 - DNA, 16 bp, synthetic construct
  source 1..16: mol_type = other DNA
aactaggtgatccggg

SEQ ID NO: 1146 - DNA, 16 bp, synthetic construct
  source 1..16: mol_type = other DNA
aatgtaggatgattct

SEQ ID NO: 1147 - DNA, 16 bp, synthetic construct
  source 1..16: mol_type = other DNA
ttctaagcttattctc

SEQ ID NO: 1148 - DNA, 16 bp, synthetic construct
  source 1..16: mol_type = other DNA
ggtgagcacggagctg

SEQ ID NO: 1149 - DNA, 16 bp, synthetic construct
  source 1..16: mol_type = other DNA
ggagaaagtgtgacca

SEQ ID NO: 1150 - DNA, 16 bp, synthetic construct
  source 1..16: mol_type = other DNA
gagcagggttaaagga

SEQ ID NO: 1151 - DNA, 16 bp, synthetic construct
  source 1..16: mol_type = other DNA
tgtcatctaggagata

SEQ ID NO: 1152 - DNA, 16 bp, synthetic construct
  source 1..16: mol_type = other DNA
ttgcatagatcctgtc

SEQ ID NO: 1153 - DNA, 16 bp, synthetic construct
  source 1..16: mol_type = other DNA
cttgatgacaggagcc

SEQ ID NO: 1154 - DNA, 16 bp, synthetic construct
  source 1..16: mol_type = other DNA
ttgaatcatgagctcc

SEQ ID NO: 1155 - DNA, 16 bp, synthetic construct
  source 1..16: mol_type = other DNA
gcccatgcatctaagt

SEQ ID NO: 1156 - DNA, 16 bp, synthetic construct
  source 1..16: mol_type = other DNA
ggactatgtggcacct

SEQ ID NO: 1157 - DNA, 16 bp, synthetic construct
  source 1..16: mol_type = other DNA
tggcaacccctgagct

SEQ ID NO: 1158 - DNA, 16 bp, synthetic construct
  source 1..16: mol_type = other DNA
gttcaggaagacccgc

SEQ ID NO: 1159 - DNA, 16 bp, synthetic construct
  source 1..16: mol_type = other DNA
gcagaggcgggaatcc

SEQ ID NO: 1160 - DNA, 16 bp, synthetic construct
  source 1..16: mol_type = other DNA
catcagggacagacct

SEQ ID NO: 1161 - DNA, 16 bp, synthetic construct
  source 1..16: mol_type = other DNA
ctgcaatctgaggcgc

SEQ ID NO: 1162 - DNA, 16 bp, synthetic construct
  source 1..16: mol_type = other DNA
ccctaagcatgccttg

SEQ ID NO: 1163 - DNA, 16 bp, synthetic construct
  source 1..16: mol_type = other DNA
tttcaaggccactagg

SEQ ID NO: 1164 - DNA, 16 bp, synthetic construct
  source 1..16: mol_type = other DNA
accttaggagccattg

SEQ ID NO: 1165 - DNA, 16 bp, synthetic construct
  source 1..16: mol_type = other DNA
acccatgtatcttcta

SEQ ID NO: 1166 - DNA, 16 bp, synthetic construct
  source 1..16: mol_type = other DNA
aatgagacagacccat

SEQ ID NO: 1167 - DNA, 16 bp, synthetic construct
  source 1..16: mol_type = other DNA
ggatacagtatgtcca

SEQ ID NO: 1168 - DNA, 16 bp, synthetic construct
  source 1..16: mol_type = other DNA
ctctactattgaatgg

SEQ ID NO: 1169 - DNA, 16 bp, synthetic construct
  source 1..16: mol_type = other DNA
attatatacctctact

SEQ ID NO: 1170 - DNA, 16 bp, synthetic construct
  source 1..16: mol_type = other DNA
atcttaaacaggtcca

SEQ ID NO: 1171 - DNA, 16 bp, synthetic construct
  source 1..16: mol_type = other DNA
actgattgtgcccttg

SEQ ID NO: 1172 - DNA, 16 bp, synthetic construct
  source 1..16: mol_type = other DNA
ccaggaggccacgact

SEQ ID NO: 1173 - DNA, 16 bp, synthetic construct
  source 1..16: mol_type = other DNA
tacaatcctctaaggt

SEQ ID NO: 1174 - DNA, 16 bp, synthetic construct
  source 1..16: mol_type = other DNA
ctgtataccctgggac

SEQ ID NO: 1175 - DNA, 16 bp, synthetic construct
  source 1..16: mol_type = other DNA
tctcagcaatcaatat

SEQ ID NO: 1176 - DNA, 16 bp, synthetic construct
  source 1..16: mol_type = other DNA
gggaagtaagccctag

SEQ ID NO: 1177 - DNA, 16 bp, synthetic construct
  source 1..16: mol_type = other DNA
ggctggagatctttag

SEQ ID NO: 1178 - DNA, 16 bp, synthetic construct
  source 1..16: mol_type = other DNA
cccaaatccctaccag

SEQ ID NO: 1179 - DNA, 16 bp, synthetic construct
  source 1..16: mol_type = other DNA
gtcattattgctactt

SEQ ID NO: 1180 - DNA, 16 bp, synthetic construct
  source 1..16: mol_type = other DNA
cagaatagccgggcgc

SEQ ID NO: 1181 - DNA, 16 bp, synthetic construct
  source 1..16: mol_type = other DNA
ggcagacacgagggtc

SEQ ID NO: 1182 - DNA, 16 bp, synthetic construct
  source 1..16: mol_type = other DNA
ccatacggatgaacct

SEQ ID NO: 1183 - DNA, 16 bp, synthetic construct
  source 1..16: mol_type = other DNA
taccatacggatgaac

SEQ ID NO: 1184 - DNA, 16 bp, synthetic construct
  source 1..16: mol_type = other DNA
ctaccatacggatgaa

SEQ ID NO: 1185 - DNA, 16 bp, synthetic construct
  source 1..16: mol_type = other DNA
gctaccatacggatga

SEQ ID NO: 1186 - DNA, 16 bp, synthetic construct
  source 1..16: mol_type = other DNA
tgctaccatacggatg

SEQ ID NO: 1187 - DNA, 16 bp, synthetic construct
  source 1..16: mol_type = other DNA
agggaattaagccaca

SEQ ID NO: 1188 - DNA, 16 bp, synthetic construct
  source 1..16: mol_type = other DNA
ggatacaccagtgtaa

SEQ ID NO: 1189 - DNA, 16 bp, synthetic construct
  source 1..16: mol_type = other DNA
agctaagtcaggcgaa

SEQ ID NO: 1190 - DNA, 16 bp, synthetic construct
  source 1..16: mol_type = other DNA
tatgagtgtgcctttg

SEQ ID NO: 1191 - DNA, 16 bp, synthetic construct
  source 1..16: mol_type = other DNA
ttcaaggttgcaagtg

SEQ ID NO: 1192 - DNA, 16 bp, synthetic construct
  source 1..16: mol_type = other DNA
agctaagccagggaca

SEQ ID NO: 1193 - DNA, 16 bp, synthetic construct
  source 1..16: mol_type = other DNA
gccttatgagtggcag

SEQ ID NO: 1194 - DNA, 16 bp, synthetic construct
  source 1..16: mol_type = other DNA
ccactttacaagagca

SEQ ID NO: 1195 - DNA, 16 bp, synthetic construct
  source 1..16: mol_type = other DNA
atcaaggtcactccca

SEQ ID NO: 1196 - DNA, 16 bp, synthetic construct
  source 1..16: mol_type = other DNA
gaagacccattcctag

SEQ ID NO: 1197 - DNA, 16 bp, synthetic construct
  source 1..16: mol_type = other DNA
ccatatcgatccctct

SEQ ID NO: 1198 - DNA, 16 bp, synthetic construct
  source 1..16: mol_type = other DNA
gaatttcctggacctt

SEQ ID NO: 1199 - DNA, 16 bp, synthetic construct
  source 1..16: mol_type = other DNA
gaaatggtagaggatg

SEQ ID NO: 1200 - DNA, 16 bp, synthetic construct
  source 1..16: mol_type = other DNA
aggcacgacctaccgt

SEQ ID NO: 1201 - DNA, 16 bp, synthetic construct
  source 1..16: mol_type = other DNA
ctccatccaggcacga

SEQ ID NO: 1202 - DNA, 16 bp, synthetic construct
  source 1..16: mol_type = other DNA
aagtaagacccccaga

SEQ ID NO: 1203 - DNA, 16 bp, synthetic construct
  source 1..16: mol_type = other DNA
ccagaaggccgtcttc

SEQ ID NO: 1204 - DNA, 16 bp, synthetic construct
  source 1..16: mol_type = other DNA
atttgtacaggtcaaa

SEQ ID NO: 1205 - DNA, 16 bp, synthetic construct
  source 1..16: mol_type = other DNA
atttgttctggttgca

SEQ ID NO: 1206 - DNA, 16 bp, synthetic construct
  source 1..16: mol_type = other DNA
gctttagacgcagaca

SEQ ID NO: 1207 - DNA, 16 bp, synthetic construct
  source 1..16: mol_type = other DNA
gggctttagacgcaga

SEQ ID NO: 1208 - DNA, 16 bp, synthetic construct
  source 1..16: mol_type = other DNA
tggacctgagaaggcg

SEQ ID NO: 1209 - DNA, 16 bp, synthetic construct
  source 1..16: mol_type = other DNA
tactggacctgagaag

SEQ ID NO: 1210 - DNA, 16 bp, synthetic construct
  source 1..16: mol_type = other DNA
agtactggacctgaga

SEQ ID NO: 1211 - DNA, 16 bp, synthetic construct
  source 1..16: mol_type = other DNA
ggagtactggacctga

SEQ ID NO: 1212 - DNA, 16 bp, synthetic construct
  source 1..16: mol_type = other DNA
gggagtactggacctg

SEQ ID NO: 1213 - DNA, 16 bp, synthetic construct
  source 1..16: mol_type = other DNA
tgggagtactggacct

SEQ ID NO: 1214 - DNA, 16 bp, synthetic construct
  source 1..16: mol_type = other DNA
ctgggagtactggacc

SEQ ID NO: 1215 - DNA, 16 bp, synthetic construct
  source 1..16: mol_type = other DNA
gaactgggagtactgg

SEQ ID NO: 1216 - DNA, 16 bp, synthetic construct
  source 1..16: mol_type = other DNA
ccgagggcaggtgaac

SEQ ID NO: 1217 - DNA, 16 bp, synthetic construct
  source 1..16: mol_type = other DNA
aggagggctcccgagg

SEQ ID NO: 1218 - DNA, 16 bp, synthetic construct
  source 1..16: mol_type = other DNA
gagccgggagttttcc

SEQ ID NO: 1219 - DNA, 16 bp, synthetic construct
  source 1..16: mol_type = other DNA
agagccgggagttttc

SEQ ID NO: 1220 - DNA, 16 bp, synthetic construct
  source 1..16: mol_type = other DNA
gtcagagccgggagtt

SEQ ID NO: 1221 - DNA, 16 bp, synthetic construct
  source 1..16: mol_type = other DNA
agtcagagccgggagt

SEQ ID NO: 1222 - DNA, 16 bp, synthetic construct
  source 1..16: mol_type = other DNA
gagtcagagccgggag

SEQ ID NO: 1223 - DNA, 16 bp, synthetic construct
  source 1..16: mol_type = other DNA
ggagtcagagccggga

SEQ ID NO: 1224 - DNA, 16 bp, synthetic construct
  source 1..16: mol_type = other DNA
aattaaaggtgagcag

SEQ ID NO: 1225 - DNA, 16 bp, synthetic construct
  source 1..16: mol_type = other DNA
atctcaattaaaggtg

SEQ ID NO: 1226 - DNA, 16 bp, synthetic construct
  source 1..16: mol_type = other DNA
agcgacaggaatctca

SEQ ID NO: 1227 - DNA, 16 bp, synthetic construct
  source 1..16: mol_type = other DNA
gaagcgacaggaatct

SEQ ID NO: 1228 - DNA, 16 bp, synthetic construct
  source 1..16: mol_type = other DNA
ggccggccagggatgg

SEQ ID NO: 1229 - DNA, 16 bp, synthetic construct
  source 1..16: mol_type = other DNA
tggccggccagggatg

SEQ ID NO: 1230 - DNA, 16 bp, synthetic construct
  source 1..16: mol_type = other DNA
ctggccggccagggat

SEQ ID NO: 1231 - DNA, 16 bp, synthetic construct
  source 1..16: mol_type = other DNA
cccgctggccggccag

SEQ ID NO: 1232 - DNA, 16 bp, synthetic construct
  source 1..16: mol_type = other DNA
gcccgctggccggcca

SEQ ID NO: 1233 - DNA, 16 bp, synthetic construct
  source 1..16: mol_type = other DNA
ccgcccgctggccggc

SEQ ID NO: 1234 - DNA, 16 bp, synthetic construct
  source 1..16: mol_type = other DNA
gcccgcccgctggccg

SEQ ID NO: 1235 - DNA, 16 bp, synthetic construct
  source 1..16: mol_type = other DNA
gagcccgcccgctggc

SEQ ID NO: 1236 - DNA, 16 bp, synthetic construct
  source 1..16: mol_type = other DNA
acaggtgcagcggcct

SEQ ID NO: 1237 - DNA, 16 bp, synthetic construct
  source 1..16: mol_type = other DNA
tcccctgacaggtgca

SEQ ID NO: 1238 - DNA, 16 bp, synthetic construct
  source 1..16: mol_type = other DNA
cagaggtctagggtcc

SEQ ID NO: 1239 - DNA, 16 bp, synthetic construct
  source 1..16: mol_type = other DNA
ctgcagaggtctaggg

SEQ ID NO: 1240 - DNA, 16 bp, synthetic construct
  source 1..16: mol_type = other DNA
ggtatgggctgcagag

SEQ ID NO: 1241 - DNA, 16 bp, synthetic construct
  source 1..16: mol_type = other DNA
ctggtatgggctgcag

SEQ ID NO: 1242 - DNA, 16 bp, synthetic construct
  source 1..16: mol_type = other DNA
gacctggtatgggctg

SEQ ID NO: 1243 - DNA, 16 bp, synthetic construct
  source 1..16: mol_type = other DNA
tgagacctggtatggg

SEQ ID NO: 1244 - DNA, 16 bp, synthetic construct
  source 1..16: mol_type = other DNA
ccatgagacctggtat

SEQ ID NO: 1245 - DNA, 16 bp, synthetic construct
  source 1..16: mol_type = other DNA
ctccatgagacctggt

SEQ ID NO: 1246 - DNA, 16 bp, synthetic construct
  source 1..16: mol_type = other DNA
tcccctccatgagacc

SEQ ID NO: 1247 - DNA, 16 bp, synthetic construct
  source 1..16: mol_type = other DNA
gttcccctccatgaga

SEQ ID NO: 1248 - DNA, 16 bp, synthetic construct
  source 1..16: mol_type = other DNA
gccctggagtggactg

SEQ ID NO: 1249 - DNA, 16 bp, synthetic construct
  source 1..16: mol_type = other DNA
agccctggagtggact

SEQ ID NO: 1250 - DNA, 16 bp, synthetic construct
  source 1..16: mol_type = other DNA
ccccttcatgagccct

SEQ ID NO: 1251 - DNA, 16 bp, synthetic construct
  source 1..16: mol_type = other DNA
tccccttcatgagccc

SEQ ID NO: 1252 - DNA, 16 bp, synthetic construct
  source 1..16: mol_type = other DNA
ttccccttcatgagcc

SEQ ID NO: 1253 - DNA, 16 bp, synthetic construct
  source 1..16: mol_type = other DNA
gcttgttccccttcat

SEQ ID NO: 1254 - DNA, 16 bp, synthetic construct
  source 1..16: mol_type = other DNA
cgcttgttccccttca

SEQ ID NO: 1255 - DNA, 16 bp, synthetic construct
  source 1..16: mol_type = other DNA
acgcttgttccccttc

SEQ ID NO: 1256 - DNA, 16 bp, synthetic construct
  source 1..16: mol_type = other DNA
cctcacgcttgttccc

SEQ ID NO: 1257 - DNA, 16 bp, synthetic construct
  source 1..16: mol_type = other DNA
gctcctcacgcttgtt

SEQ ID NO: 1258 - DNA, 16 bp, synthetic construct
  source 1..16: mol_type = other DNA
actcgatcagggcctc

SEQ ID NO: 1259 - DNA, 16 bp, synthetic construct
  source 1..16: mol_type = other DNA
gaactcgatcagggcc

SEQ ID NO: 1260 - DNA, 16 bp, synthetic construct
  source 1..16: mol_type = other DNA
tggaactcgatcaggg

SEQ ID NO: 1261 - DNA, 16 bp, synthetic construct
  source 1..16: mol_type = other DNA
ggtggaactcgatcag

SEQ ID NO: 1262 - DNA, 16 bp, synthetic construct
  source 1..16: mol_type = other DNA
cggtggaactcgatca

SEQ ID NO: 1263 - DNA, 16 bp, synthetic construct
  source 1..16: mol_type = other DNA
gcggtggaactcgatc

SEQ ID NO: 1264 - DNA, 16 bp, synthetic construct
  source 1..16: mol_type = other DNA
gagcggtggaactcga

SEQ ID NO: 1265 - DNA, 16 bp, synthetic construct
  source 1..16: mol_type = other DNA
ggagcggtggaactcg

SEQ ID NO: 1266 - DNA, 16 bp, synthetic construct
  source 1..16: mol_type = other DNA
ctcggtaggagcggtg

SEQ ID NO: 1267 - DNA, 16 bp, synthetic construct
  source 1..16: mol_type = other DNA
ctctcggtaggagcgg

SEQ ID NO: 1268 - DNA, 16 bp, synthetic construct
  source 1..16: mol_type = other DNA
cggttgtgctgggagc

SEQ ID NO: 1269 - DNA, 16 bp, synthetic construct
  source 1..16: mol_type = other DNA
gcggttgtgctgggag

SEQ ID NO: 1270 - DNA, 16 bp, synthetic construct
  source 1..16: mol_type = other DNA
atgcggttgtgctggg

SEQ ID NO: 1271 - DNA, 16 bp, synthetic construct
  source 1..16: mol_type = other DNA
tcttcatgcggttgtg

SEQ ID NO: 1272 - DNA, 16 bp, synthetic construct
  source 1..16: mol_type = other DNA
ggccgtcttcatgcgg

SEQ ID NO: 1273 - DNA, 16 bp, synthetic construct
  source 1..16: mol_type = other DNA
gaaggccgtcttcatg

SEQ ID NO: 1274 - DNA, 16 bp, synthetic construct
  source 1..16: mol_type = other DNA
atgccaaaggtgcaga

SEQ ID NO: 1275 - DNA, 16 bp, synthetic construct
  source 1..16: mol_type = other DNA
acatcatgccaaaggt

SEQ ID NO: 1276 - DNA, 16 bp, synthetic construct
  source 1..16: mol_type = other DNA
cagtacatcatgccaa

SEQ ID NO: 1277 - DNA, 16 bp, synthetic construct
  source 1..16: mol_type = other DNA
aaagcaggccgaattg

SEQ ID NO: 1278 - DNA, 16 bp, synthetic construct
  source 1..16: mol_type = other DNA
ccgaaaagcaggccga

SEQ ID NO: 1279 - DNA, 16 bp, synthetic construct
  source 1..16: mol_type = other DNA
ctccgaaaagcaggcc

SEQ ID NO: 1280 - DNA, 16 bp, synthetic construct
  source 1..16: mol_type = other DNA
ctctccgaaaagcagg

SEQ ID NO: 1281 - DNA, 16 bp, synthetic construct
  source 1..16: mol_type = other DNA
actctccgaaaagcag

SEQ ID NO: 1282 - DNA, 16 bp, synthetic construct
  source 1..16: mol_type = other DNA
gtactctccgaaaagc

SEQ ID NO: 1283 - DNA, 16 bp, synthetic construct
  source 1..16: mol_type = other DNA
agtactctccgaaaag

SEQ ID NO: 1284 - DNA, 16 bp, synthetic construct
  source 1..16: mol_type = other DNA
tgaagtactctccgaa

SEQ ID NO: 1285 - DNA, 16 bp, synthetic construct
  source 1..16: mol_type = other DNA
gtagctgaagtactct

SEQ ID NO: 1286 - DNA, 16 bp, synthetic construct
  source 1..16: mol_type = other DNA
ggtagctgaagtactc

SEQ ID NO: 1287 - DNA, 16 bp, synthetic construct
  source 1..16: mol_type = other DNA
cgagcttgtccgagtt

SEQ ID NO: 1288 - DNA, 16 bp, synthetic construct
  source 1..16: mol_type = other DNA
gacgagcttgtccgag

SEQ ID NO: 1289 - DNA, 16 bp, synthetic construct
  source 1..16: mol_type = other DNA
agacgagcttgtccga

SEQ ID NO: 1290 - DNA, 16 bp, synthetic construct
  source 1..16: mol_type = other DNA
gaagacgagcttgtcc

SEQ ID NO: 1291 - DNA, 16 bp, synthetic construct
  source 1..16: mol_type = other DNA
ggaagacgagcttgtc

SEQ ID NO: 1292 - DNA, 16 bp, synthetic construct
  source 1..16: mol_type = other DNA
gggaagacgagcttgt

SEQ ID NO: 1293 - DNA, 16 bp, synthetic construct
  source 1..16: mol_type = other DNA
tccgggtacctgtagg

SEQ ID NO: 1294 - DNA, 16 bp, synthetic construct
  source 1..16: mol_type = other DNA
ttccgggtacctgtag

SEQ ID NO: 1295 - DNA, 16 bp, synthetic construct
  source 1..16: mol_type = other DNA
ttaatttccgggtacc

SEQ ID NO: 1296 - DNA, 16 bp, synthetic construct
  source 1..16: mol_type = other DNA
ctctttaatttccggg

SEQ ID NO: 1297 - DNA, 16 bp, synthetic construct
  source 1..16: mol_type = other DNA
tttgtacaggtcaaag

SEQ ID NO: 1298 - DNA, 16 bp, synthetic construct
  source 1..16: mol_type = other DNA
gtatttgtacaggtca

SEQ ID NO: 1299 - DNA, 16 bp, synthetic construct
  source 1..16: mol_type = other DNA
gtgaaggagctgtatt

SEQ ID NO: 1300 - DNA, 16 bp, synthetic construct
  source 1..16: mol_type = other DNA
acgagagtggtgaagg

SEQ ID NO: 1301 - DNA, 16 bp, synthetic construct
  source 1..16: mol_type = other DNA
ccacgagagtggtgaa

SEQ ID NO: 1302 - DNA, 16 bp, synthetic construct
  source 1..16: mol_type = other DNA
gccacgagagtggtga

SEQ ID NO: 1303 - DNA, 16 bp, synthetic construct
  source 1..16: mol_type = other DNA
agccggccacgagagt

SEQ ID NO: 1304 - DNA, 16 bp, synthetic construct
  source 1..16: mol_type = other DNA
gagccggccacgagag

SEQ ID NO: 1305 - DNA, 16 bp, synthetic construct
  source 1..16: mol_type = other DNA
ggtcgcgacggctgcg

SEQ ID NO: 1306 - DNA, 16 bp, synthetic construct
  source 1..16: mol_type = other DNA
gcaggtcgcgacggct

SEQ ID NO: 1307 - DNA, 16 bp, synthetic construct
  source 1..16: mol_type = other DNA
cgcaggtcgcgacggc

SEQ ID NO: 1308 - DNA, 16 bp, synthetic construct
  source 1..16: mol_type = other DNA
ccccgcaggtcgcgac

SEQ ID NO: 1309 - DNA, 16 bp, synthetic construct
  source 1..16: mol_type = other DNA
cccccgcaggtcgcga

SEQ ID NO: 1310 - DNA, 16 bp, synthetic construct
  source 1..16: mol_type = other DNA
tcccccgcaggtcgcg

SEQ ID NO: 1311 - DNA, 16 bp, synthetic construct
  source 1..16: mol_type = other DNA
gtcccccgcaggtcgc

SEQ ID NO: 1312 - DNA, 16 bp, synthetic construct
  source 1..16: mol_type = other DNA
gagtcccccgcaggtc

SEQ ID NO: 1313 - DNA, 16 bp, synthetic construct
  source 1..16: mol_type = other DNA
tgcggcagagtccccc

SEQ ID NO: 1314 - DNA, 16 bp, synthetic construct
  source 1..16: mol_type = other DNA
ggtgcggcagagtccc

SEQ ID NO: 1315 - DNA, 16 bp, synthetic construct
  source 1..16: mol_type = other DNA
ccacgctacgggctcg

SEQ ID NO: 1316 - DNA, 16 bp, synthetic construct
  source 1..16: mol_type = other DNA
ggccacgctacgggct

SEQ ID NO: 1317 - DNA, 16 bp, synthetic construct
  source 1..16: mol_type = other DNA
gaggccacgctacggg

SEQ ID NO: 1318 - DNA, 16 bp, synthetic construct
  source 1..16: mol_type = other DNA
ggaggccacgctacgg

SEQ ID NO: 1319 - DNA, 16 bp, synthetic construct
  source 1..16: mol_type = other DNA
ctggaggccacgctac

SEQ ID NO: 1320 - DNA, 16 bp, synthetic construct
  source 1..16: mol_type = other DNA
agctggaggccacgct

SEQ ID NO: 1321 - DNA, 16 bp, synthetic construct
  source 1..16: mol_type = other DNA
cccgcaagctggaggc

SEQ ID NO: 1322 - DNA, 16 bp, synthetic construct
  source 1..16: mol_type = other DNA
gttgtcccgcaagctg

SEQ ID NO: 1323 - DNA, 16 bp, synthetic construct
  source 1..16: mol_type = other DNA
ggttgttgtcccgcaa

SEQ ID NO: 1324 - DNA, 16 bp, synthetic construct
  source 1..16: mol_type = other DNA
gggttgttgtcccgca

SEQ ID NO: 1325 - DNA, 16 bp, synthetic construct
  source 1..16: mol_type = other DNA
tgttctggttgcacag

SEQ ID NO: 1326 - DNA, 16 bp, synthetic construct
  source 1..16: mol_type = other DNA
ttgttctggttgcaca

SEQ ID NO: 1327 - DNA, 16 bp, synthetic construct
  source 1..16: mol_type = other DNA
tttgttctggttgcac

SEQ ID NO: 1328 - DNA, 16 bp, synthetic construct
  source 1..16: mol_type = other DNA
gatttgttctggttgc

SEQ ID NO: 1329 - DNA, 16 bp, synthetic construct
  source 1..16: mol_type = other DNA
cgatttgttctggttg

SEQ ID NO: 1330 - DNA, 16 bp, synthetic construct
  source 1..16: mol_type = other DNA
tccgatttgttctggt

SEQ ID NO: 1331 - DNA, 16 bp, synthetic construct
  source 1..16: mol_type = other DNA
cagtccgatttgttct

SEQ ID NO: 1332 - DNA, 16 bp, synthetic construct
  source 1..16: mol_type = other DNA
gcagtccgatttgttc

SEQ ID NO: 1333 - DNA, 16 bp, synthetic construct
  source 1..16: mol_type = other DNA
tgagtatgtctggtag

SEQ ID NO: 1334 - DNA, 16 bp, synthetic construct
  source 1..16: mol_type = other DNA
atgagtatgtctggta

SEQ ID NO: 1335 - DNA, 16 bp, synthetic construct
  source 1..16: mol_type = other DNA
tgatgagtatgtctgg

SEQ ID NO: 1336 - DNA, 16 bp, synthetic construct
  source 1..16: mol_type = other DNA
cccctgatgagtatgt

SEQ ID NO: 1337 - DNA, 16 bp, synthetic construct
  source 1..16: mol_type = other DNA
cacccctgatgagtat

SEQ ID NO: 1338 - DNA, 16 bp, synthetic construct
  source 1..16: mol_type = other DNA
tccacccctgatgagt

SEQ ID NO: 1339 - DNA, 16 bp, synthetic construct
  source 1..16: mol_type = other DNA
gcatccacccctgatg

SEQ ID NO: 1340 - DNA, 16 bp, synthetic construct
  source 1..16: mol_type = other DNA
cgcatccacccctgat

SEQ ID NO: 1341 - DNA, 16 bp, synthetic construct
  source 1..16: mol_type = other DNA
tcaccgcatccacccc

SEQ ID NO: 1342 - DNA, 16 bp, synthetic construct
  source 1..16: mol_type = other DNA
cctcaccgcatccacc

SEQ ID NO: 1343 - DNA, 16 bp, synthetic construct
  source 1..16: mol_type = other DNA
ttgatgtagtggaagc

SEQ ID NO: 1344 - DNA, 16 bp, synthetic construct
  source 1..16: mol_type = other DNA
tcgacaggatgttgat

SEQ ID NO: 1345 - DNA, 16 bp, synthetic construct
  source 1..16: mol_type = other DNA
cctcgacaggatgttg

SEQ ID NO: 1346 - DNA, 16 bp, synthetic construct
  source 1..16: mol_type = other DNA
gcctcgacaggatgtt

SEQ ID NO: 1347 - DNA, 16 bp, synthetic construct
  source 1..16: mol_type = other DNA
gcagcctcgacaggat

SEQ ID NO: 1348 - DNA, 16 bp, synthetic construct
  source 1..16: mol_type = other DNA
ggcagcctcgacagga

SEQ ID NO: 1349 - DNA, 16 bp, synthetic construct
  source 1..16: mol_type = other DNA
agagtctctggcagcc

SEQ ID NO: 1350 - DNA, 16 bp, synthetic construct
  source 1..16: mol_type = other DNA
atgaagttgcccagcg

SEQ ID NO: 1351 - DNA, 16 bp, synthetic construct
  source 1..16: mol_type = other DNA
ggcgaagatgaagttg

SEQ ID NO: 1352 - DNA, 16 bp, synthetic construct
  source 1..16: mol_type = other DNA
ggcaggcgaagatgaa

SEQ ID NO: 1353 - DNA, 16 bp, synthetic construct
  source 1..16: mol_type = other DNA
cctggttgcaggagac

SEQ ID NO: 1354 - DNA, 16 bp, synthetic construct
  source 1..16: mol_type = other DNA
cgcctggttgcaggag

SEQ ID NO: 1355 - DNA, 16 bp, synthetic construct
  source 1..16: mol_type = other DNA
ttcgcctggttgcagg

SEQ ID NO: 1356 - DNA, 16 bp, synthetic construct
  source 1..16: mol_type = other DNA
attcgcctggttgcag

SEQ ID NO: 1357 - DNA, 16 bp, synthetic construct
  source 1..16: mol_type = other DNA
taattcgcctggttgc

SEQ ID NO: 1358 - DNA, 16 bp, synthetic construct
  source 1..16: mol_type = other DNA
agtaattcgcctggtt

SEQ ID NO: 1359 - DNA, 16 bp, synthetic construct
  source 1..16: mol_type = other DNA
gagtaattcgcctggt

SEQ ID NO: 1360 - DNA, 16 bp, synthetic construct
  source 1..16: mol_type = other DNA
gagagtaattcgcctg

SEQ ID NO: 1361 - DNA, 16 bp, synthetic construct
  source 1..16: mol_type = other DNA
gtggaagtgagagtaa

SEQ ID NO: 1362 - DNA, 16 bp, synthetic construct
  source 1..16: mol_type = other DNA
gacatccagaggttgg

SEQ ID NO: 1363 - DNA, 16 bp, synthetic construct
  source 1..16: mol_type = other DNA
ggacagaccgttgttg

SEQ ID NO: 1364 - DNA, 16 bp, synthetic construct
  source 1..16: mol_type = other DNA
catcagggacagaccg

SEQ ID NO: 1365 - DNA, 16 bp, synthetic construct
  source 1..16: mol_type = other DNA
gcatcagggacagacc

SEQ ID NO: 1366 - DNA, 16 bp, synthetic construct
  source 1..16: mol_type = other DNA
gcgcagcatcagggac

SEQ ID NO: 1367 - DNA, 16 bp, synthetic construct
  source 1..16: mol_type = other DNA
gcgcgcagcatcaggg

SEQ ID NO: 1368 - DNA, 16 bp, synthetic construct
  source 1..16: mol_type = other DNA
ctgcgcgcagcatcag

SEQ ID NO: 1369 - DNA, 16 bp, synthetic construct
  source 1..16: mol_type = other DNA
ctctgcgcgcagcatc

SEQ ID NO: 1370 - DNA, 16 bp, synthetic construct
  source 1..16: mol_type = other DNA
gctctgcgcgcagcat

SEQ ID NO: 1371 - DNA, 16 bp, synthetic construct
  source 1..16: mol_type = other DNA
tctgctctgcgcgcag

SEQ ID NO: 1372 - DNA, 16 bp, synthetic construct
  source 1..16: mol_type = other DNA
ttctgctctgcgcgca

SEQ ID NO: 1373 - DNA, 16 bp, synthetic construct
  source 1..16: mol_type = other DNA
caccattacccgggcc

SEQ ID NO: 1374 - DNA, 16 bp, synthetic construct
  source 1..16: mol_type = other DNA
tgcccgtgcaccatta

SEQ ID NO: 1375 - DNA, 16 bp, synthetic construct
  source 1..16: mol_type = other DNA
cctgcccgtgcaccat

SEQ ID NO: 1376 - DNA, 16 bp, synthetic construct
  source 1..16: mol_type = other DNA
tcctgcccgtgcacca

SEQ ID NO: 1377 - DNA, 16 bp, synthetic construct
  source 1..16: mol_type = other DNA
atcctgcccgtgcacc

SEQ ID NO: 1378 - DNA, 16 bp, synthetic construct
  source 1..16: mol_type = other DNA
ttcatcctgcccgtgc

SEQ ID NO: 1379 - DNA, 16 bp, synthetic construct
  source 1..16: mol_type = other DNA
ggttcatcctgcccgt

SEQ ID NO: 1380 - DNA, 16 bp, synthetic construct
  source 1..16: mol_type = other DNA
aggttcatcctgcccg

SEQ ID NO: 1381 - DNA, 16 bp, synthetic construct
  source 1..16: mol_type = other DNA
taaaggcaggttcatc

SEQ ID NO: 1382 - DNA, 16 bp, synthetic construct
  source 1..16: mol_type = other DNA
ccataaaggcaggttc

SEQ ID NO: 1383 - DNA, 16 bp, synthetic construct
  source 1..16: mol_type = other DNA
cacgccaggccgcaag

SEQ ID NO: 1384 - DNA, 16 bp, synthetic construct
  source 1..16: mol_type = other DNA
ccacgccaggccgcaa

SEQ ID NO: 1385 - DNA, 16 bp, synthetic construct
  source 1..16: mol_type = other DNA
tccacgccaggccgca

SEQ ID NO: 1386 - DNA, 16 bp, synthetic construct
  source 1..16: mol_type = other DNA
ctccacgccaggccgc

SEQ ID NO: 1387 - DNA, 16 bp, synthetic construct
  source 1..16: mol_type = other DNA
ggtctccacgccaggc

SEQ ID NO: 1388 - DNA, 16 bp, synthetic construct
  source 1..16: mol_type = other DNA
gaggtctccacgccag

SEQ ID NO: 1389 - DNA, 16 bp, synthetic construct
  source 1..16: mol_type = other DNA
ggaggtctccacgcca

SEQ ID NO: 1390 - DNA, 16 bp, synthetic construct
  source 1..16: mol_type = other DNA
atggaggtctccacgc

SEQ ID NO: 1391 - DNA, 16 bp, synthetic construct
  source 1..16: mol_type = other DNA
cgcccccaagtctgtc

SEQ ID NO: 1392 - DNA, 16 bp, synthetic construct
  source 1..16: mol_type = other DNA
tcgcccccaagtctgt

SEQ ID NO: 1393 - DNA, 16 bp, synthetic construct
  source 1..16: mol_type = other DNA
ttggtgcagtcgccat

SEQ ID NO: 1394 - DNA, 16 bp, synthetic construct
  source 1..16: mol_type = other DNA
cttggtgcagtcgcca

SEQ ID NO: 1395 - DNA, 16 bp, synthetic construct
  source 1..16: mol_type = other DNA
tcttggtgcagtcgcc

SEQ ID NO: 1396 - DNA, 16 bp, synthetic construct
  source 1..16: mol_type = other DNA
cattcttggtgcagtc

SEQ ID NO: 1397 - DNA, 16 bp, synthetic construct
  source 1..16: mol_type = other DNA
gccattcttggtgcag

SEQ ID NO: 1398 - DNA, 16 bp, synthetic construct
  source 1..16: mol_type = other DNA
ctgccattcttggtgc

SEQ ID NO: 1399 - DNA, 16 bp, synthetic construct
  source 1..16: mol_type = other DNA
aggaacatcactgcca

SEQ ID NO: 1400 - DNA, 16 bp, synthetic construct
  source 1..16: mol_type = other DNA
ggtaaaggttctcaac

SEQ ID NO: 1401 - DNA, 16 bp, synthetic construct
  source 1..16: mol_type = other DNA
gtgtactttgaagggt

SEQ ID NO: 1402 - DNA, 16 bp, synthetic construct
  source 1..16: mol_type = other DNA
gaatacacacctgctg

SEQ ID NO: 1403 - DNA, 16 bp, synthetic construct
  source 1..16: mol_type = other DNA
ctccttgatcatgctc

SEQ ID NO: 1404 - DNA, 16 bp, synthetic construct
  source 1..16: mol_type = other DNA
actccttgatcatgct

SEQ ID NO: 1405 - DNA, 16 bp, synthetic construct
  source 1..16: mol_type = other DNA
cactccttgatcatgc

SEQ ID NO: 1406 - DNA, 16 bp, synthetic construct
  source 1..16: mol_type = other DNA
acactccttgatcatg

SEQ ID NO: 1407 - DNA, 16 bp, synthetic construct
  source 1..16: mol_type = other DNA
cacactccttgatcat

SEQ ID NO: 1408 - DNA, 16 bp, synthetic construct
  source 1..16: mol_type = other DNA
gccacactccttgatc

SEQ ID NO: 1409 - DNA, 16 bp, synthetic construct
  source 1..16: mol_type = other DNA
gatgtaggcacagcca

SEQ ID NO: 1410 - DNA, 16 bp, synthetic construct
  source 1..16: mol_type = other DNA
agatgtaggcacagcc

SEQ ID NO: 1411 - DNA, 16 bp, synthetic construct
  source 1..16: mol_type = other DNA
tagaagatgtaggcac

SEQ ID NO: 1412 - DNA, 16 bp, synthetic construct
  source 1..16: mol_type = other DNA
atagaagatgtaggca

SEQ ID NO: 1413 - DNA, 16 bp, synthetic construct
  source 1..16: mol_type = other DNA
tacccccaggaactgt

SEQ ID NO: 1414 - DNA, 16 bp, synthetic construct
  source 1..16: mol_type = other DNA
gtacccccaggaactg

SEQ ID NO: 1415 - DNA, 16 bp, synthetic construct
  source 1..16: mol_type = other DNA
agtacccccaggaact

SEQ ID NO: 1416 - DNA, 16 bp, synthetic construct
  source 1..16: mol_type = other DNA
cagtacccccaggaac

SEQ ID NO: 1417 - DNA, 16 bp, synthetic construct
  source 1..16: mol_type = other DNA
atagtagcagtacccc

SEQ ID NO: 1418 - DNA, 16 bp, synthetic construct
  source 1..16: mol_type = other DNA
ttatagtagcagtacc

SEQ ID NO: 1419 - DNA, 16 bp, synthetic construct
  source 1..16: mol_type = other DNA
gagcttatagtagcag

SEQ ID NO: 1420 - DNA, 16 bp, synthetic construct
  source 1..16: mol_type = other DNA
ggagcttatagtagca

SEQ ID NO: 1421 - DNA, 16 bp, synthetic construct
  source 1..16: mol_type = other DNA
tcaacctggagcttat

SEQ ID NO: 1422 - DNA, 16 bp, synthetic construct
  source 1..16: mol_type = other DNA
agtcaacctggagctt

SEQ ID NO: 1423 - DNA, 16 bp, synthetic construct
  source 1..16: mol_type = other DNA
cacgctgcatggcttc

SEQ ID NO: 1424 - DNA, 16 bp, synthetic construct
  source 1..16: mol_type = other DNA
ggtcacgctgcatggc

SEQ ID NO: 1425 - DNA, 16 bp, synthetic construct
  source 1..16: mol_type = other DNA
ctggtcacgctgcatg

SEQ ID NO: 1426 - DNA, 16 bp, synthetic construct
  source 1..16: mol_type = other DNA
gctggtcacgctgcat

SEQ ID NO: 1427 - DNA, 16 bp, synthetic construct
  source 1..16: mol_type = other DNA
agctggtcacgctgca

SEQ ID NO: 1428 - DNA, 16 bp, synthetic construct
  source 1..16: mol_type = other DNA
ggtagctggtcacgct

SEQ ID NO: 1429 - DNA, 16 bp, synthetic construct
  source 1..16: mol_type = other DNA
ctggtagctggtcacg

SEQ ID NO: 1430 - DNA, 16 bp, synthetic construct
  source 1..16: mol_type = other DNA
gagctggtagctggtc

SEQ ID NO: 1431 - DNA, 16 bp, synthetic construct
  source 1..16: mol_type = other DNA
gcagagagctggtagc

SEQ ID NO: 1432 - DNA, 16 bp, synthetic construct
  source 1..16: mol_type = other DNA
cgtgagtaaccagcag

SEQ ID NO: 1433 - DNA, 16 bp, synthetic construct
  source 1..16: mol_type = other DNA
gactcagaattggttt

SEQ ID NO: 1434 - DNA, 16 bp, synthetic construct
  source 1..16: mol_type = other DNA
ccgaggagccgaacca

SEQ ID NO: 1435 - DNA, 16 bp, synthetic construct
  source 1..16: mol_type = other DNA
aacaccgaggagccga

SEQ ID NO: 1436 - DNA, 16 bp, synthetic construct
  source 1..16: mol_type = other DNA
caacaccgaggagccg

SEQ ID NO: 1437 - DNA, 16 bp, synthetic construct
  source 1..16: mol_type = other DNA
gacaacaccgaggagc

SEQ ID NO: 1438 - DNA, 16 bp, synthetic construct
  source 1..16: mol_type = other DNA
cagacaacaccgagga

SEQ ID NO: 1439 - DNA, 16 bp, synthetic construct
  source 1..16: mol_type = other DNA
cacagacaacaccgag

SEQ ID NO: 1440 - DNA, 16 bp, synthetic construct
  source 1..16: mol_type = other DNA
ccacagacaacaccga

SEQ ID NO: 1441 - DNA, 16 bp, synthetic construct
  source 1..16: mol_type = other DNA
tcaaagacgagctcag

SEQ ID NO: 1442 - DNA, 16 bp, synthetic construct
  source 1..16: mol_type = other DNA
gtcaaagacgagctca

SEQ ID NO: 1443 - DNA, 16 bp, synthetic construct
  source 1..16: mol_type = other DNA
accttcggagcagcat

SEQ ID NO: 1444 - DNA, 16 bp, synthetic construct
  source 1..16: mol_type = other DNA
gaaccttcggagcagc

SEQ ID NO: 1445 - DNA, 16 bp, synthetic construct
  source 1..16: mol_type = other DNA
ggaaccttcggagcag

SEQ ID NO: 1446 - DNA, 16 bp, synthetic construct
  source 1..16: mol_type = other DNA
cggaaccttcggagca

SEQ ID NO: 1447 - DNA, 16 bp, synthetic construct
  source 1..16: mol_type = other DNA
tcggaaccttcggagc

SEQ ID NO: 1448 - DNA, 16 bp, synthetic construct
  source 1..16: mol_type = other DNA
ttcggaaccttcggag

SEQ ID NO: 1449 - DNA, 16 bp, synthetic construct
  source 1..16: mol_type = other DNA
cttcggaaccttcgga

SEQ ID NO: 1450 - DNA, 16 bp, synthetic construct
  source 1..16: mol_type = other DNA
gcttcggaaccttcgg

SEQ ID NO: 1451 - DNA, 16 bp, synthetic construct
  source 1..16: mol_type = other DNA
tcggcttcggaacctt

SEQ ID NO: 1452 - DNA, 16 bp, synthetic construct
  source 1..16: mol_type = other DNA
atcggcttcggaacct

SEQ ID NO: 1453 - DNA, 16 bp, synthetic construct
  source 1..16: mol_type = other DNA
tggagaccagtatcgg

SEQ ID NO: 1454 - DNA, 16 bp, synthetic construct
  source 1..16: mol_type = other DNA
cctggagaccagtatc

SEQ ID NO: 1455 - DNA, 16 bp, synthetic construct
  source 1..16: mol_type = other DNA
ctcggcctggagacca

SEQ ID NO: 1456 - DNA, 16 bp, synthetic construct
  source 1..16: mol_type = other DNA
cccctcggcctggaga

SEQ ID NO: 1457 - DNA, 16 bp, synthetic construct
  source 1..16: mol_type = other DNA
gccccctcggcctgga

SEQ ID NO: 1458 - DNA, 16 bp, synthetic construct
  source 1..16: mol_type = other DNA
tgccccctcggcctgg

SEQ ID NO: 1459 - DNA, 16 bp, synthetic construct
  source 1..16: mol_type = other DNA
aggctacctcctgagc

SEQ ID NO: 1460 - DNA, 16 bp, synthetic construct
  source 1..16: mol_type = other DNA
ggtggaggctacctcc

SEQ ID NO: 1461 - DNA, 16 bp, synthetic construct
  source 1..16: mol_type = other DNA
gcccccccagaggaca

SEQ ID NO: 1462 - DNA, 16 bp, synthetic construct
  source 1..16: mol_type = other DNA
ggcccccccagaggac

SEQ ID NO: 1463 - DNA, 16 bp, synthetic construct
  source 1..16: mol_type = other DNA
gcatctgccttggtgt

SEQ ID NO: 1464 - DNA, 16 bp, synthetic construct
  source 1..16: mol_type = other DNA
gagcatctgccttggt

SEQ ID NO: 1465 - DNA, 16 bp, synthetic construct
  source 1..16: mol_type = other DNA
aggagcatctgccttg

SEQ ID NO: 1466 - DNA, 16 bp, synthetic construct
  source 1..16: mol_type = other DNA
caccagaggagcatct

SEQ ID NO: 1467 - DNA, 16 bp, synthetic construct
  source 1..16: mol_type = other DNA
ccaccagaggagcatc

SEQ ID NO: 1468 - DNA, 16 bp, synthetic construct
  source 1..16: mol_type = other DNA
aatcttgccagggcca

SEQ ID NO: 1469 - DNA, 16 bp, synthetic construct
  source 1..16: mol_type = other DNA
caatcttgccagggcc

SEQ ID NO: 1470 - DNA, 16 bp, synthetic construct
  source 1..16: mol_type = other DNA
cttcaatcttgccagg

SEQ ID NO: 1471 - DNA, 16 bp, synthetic construct
  source 1..16: mol_type = other DNA
gtttgggcggctctga

SEQ ID NO: 1472 - DNA, 16 bp, synthetic construct
  source 1..16: mol_type = other DNA
cagtttgggcggctct

SEQ ID NO: 1473 - DNA, 16 bp, synthetic construct
  source 1..16: mol_type = other DNA
cctccacacatcaacg

SEQ ID NO: 1474 - DNA, 16 bp, synthetic construct
  source 1..16: mol_type = other DNA
gagcccttacccatct

SEQ ID NO: 1475 - DNA, 16 bp, synthetic construct
  source 1..16: mol_type = other DNA
tgagcccttacccatc

SEQ ID NO: 1476 - DNA, 16 bp, synthetic construct
  source 1..16: mol_type = other DNA
tcctgagcccttaccc

SEQ ID NO: 1477 - DNA, 16 bp, synthetic construct
  source 1..16: mol_type = other DNA
gagcaacttcctgagc

SEQ ID NO: 1478 - DNA, 16 bp, synthetic construct
  source 1..16: mol_type = other DNA
tggagcaacttcctga

SEQ ID NO: 1479 - DNA, 16 bp, synthetic construct
  source 1..16: mol_type = other DNA
ctactgttcttggagc

SEQ ID NO: 1480 - DNA, 16 bp, synthetic construct
  source 1..16: mol_type = other DNA
cagctactgttcttgg

SEQ ID NO: 1481 - DNA, 16 bp, synthetic construct
  source 1..16: mol_type = other DNA
tctgggcagcttcatc

SEQ ID NO: 1482 - DNA, 16 bp, synthetic construct
  source 1..16: mol_type = other DNA
gagccaaggcacttct

SEQ ID NO: 1483 - DNA, 16 bp, synthetic construct
  source 1..16: mol_type = other DNA
cttagccgcagttggg

SEQ ID NO: 1484 - DNA, 16 bp, synthetic construct
  source 1..16: mol_type = other DNA
acttagccgcagttgg

SEQ ID NO: 1485 - DNA, 16 bp, synthetic construct
  source 1..16: mol_type = other DNA
gacttagccgcagttg

SEQ ID NO: 1486 - DNA, 16 bp, synthetic construct
  source 1..16: mol_type = other DNA
agacttagccgcagtt

SEQ ID NO: 1487 - DNA, 16 bp, synthetic construct
  source 1..16: mol_type = other DNA
gagacttagccgcagt

SEQ ID NO: 1488 - DNA, 16 bp, synthetic construct
  source 1..16: mol_type = other DNA
aagagacttagccgca

SEQ ID NO: 1489 - DNA, 16 bp, synthetic construct
  source 1..16: mol_type = other DNA
aaaagagacttagccg

SEQ ID NO: 1490 - DNA, 16 bp, synthetic construct
  source 1..16: mol_type = other DNA
tggctgatccaaggga

SEQ ID NO: 1491 - DNA, 16 bp, synthetic construct
  source 1..16: mol_type = other DNA
ttggctgatccaaggg

SEQ ID NO: 1492 - DNA, 16 bp, synthetic construct
  source 1..16: mol_type = other DNA
aagtttcgcttggctg

SEQ ID NO: 1493 - DNA, 16 bp, synthetic construct
  source 1..16: mol_type = other DNA
ccaagtttcgcttggc

SEQ ID NO: 1494 - DNA, 16 bp, synthetic construct
  source 1..16: mol_type = other DNA
ctccaagtttcgcttg

SEQ ID NO: 1495 - DNA, 16 bp, synthetic construct
  source 1..16: mol_type = other DNA
agctccaagtttcgct

SEQ ID NO: 1496 - DNA, 16 bp, synthetic construct
  source 1..16: mol_type = other DNA
ttgtcaaagctccaag

SEQ ID NO: 1497 - DNA, 16 bp, synthetic construct
  source 1..16: mol_type = other DNA
ccttgtcaaagctcca

SEQ ID NO: 1498 - DNA, 16 bp, synthetic construct
  source 1..16: mol_type = other DNA
ttccttgtcaaagctc

SEQ ID NO: 1499 - DNA, 16 bp, synthetic construct
  source 1..16: mol_type = other DNA
aagttccttgtcaaag

SEQ ID NO: 1500 - DNA, 16 bp, synthetic construct
  source 1..16: mol_type = other DNA
gcggtttcttaggaaa

SEQ ID NO: 1501 - DNA, 16 bp, synthetic construct
  source 1..16: mol_type = other DNA
agcggtttcttaggaa

SEQ ID NO: 1502 - DNA, 16 bp, synthetic construct
  source 1..16: mol_type = other DNA
gtacccttggttgtgt

SEQ ID NO: 1503 - DNA, 16 bp, synthetic construct
  source 1..16: mol_type = other DNA
gtgtacccttggttgt

SEQ ID NO: 1504 - DNA, 16 bp, synthetic construct
  source 1..16: mol_type = other DNA
cgtgtacccttggttg

SEQ ID NO: 1505 - DNA, 16 bp, synthetic construct
  source 1..16: mol_type = other DNA
cccgtgcatgcctgcg

SEQ ID NO: 1506 - DNA, 16 bp, synthetic construct
  source 1..16: mol_type = other DNA
gaaacccgtgcatgcc

SEQ ID NO: 1507 - DNA, 16 bp, synthetic construct
  source 1..16: mol_type = other DNA
aggaaacccgtgcatg

SEQ ID NO: 1508 - DNA, 16 bp, synthetic construct
  source 1..16: mol_type = other DNA
caggaaacccgtgcat

SEQ ID NO: 1509 - DNA, 16 bp, synthetic construct
  source 1..16: mol_type = other DNA
gcaggaaacccgtgca

SEQ ID NO: 1510 - DNA, 16 bp, synthetic construct
  source 1..16: mol_type = other DNA
tcgctgggcaggaaac

SEQ ID NO: 1511 - DNA, 16 bp, synthetic construct
  source 1..16: mol_type = other DNA
cgtcgctgggcaggaa

SEQ ID NO: 1512 - DNA, 16 bp, synthetic construct
  source 1..16: mol_type = other DNA
gtgctactggagagca

SEQ ID NO: 1513 - DNA, 16 bp, synthetic construct
  source 1..16: mol_type = other DNA
tgtgctactggagagc

SEQ ID NO: 1514 - DNA, 16 bp, synthetic construct
  source 1..16: mol_type = other DNA
ctgtgctactggagag

SEQ ID NO: 1515 - DNA, 16 bp, synthetic construct
  source 1..16: mol_type = other DNA
tctgtgctactggaga

SEQ ID NO: 1516 - DNA, 16 bp, synthetic construct
  source 1..16: mol_type = other DNA
atctgtgctactggag

SEQ ID NO: 1517 - DNA, 16 bp, synthetic construct
  source 1..16: mol_type = other DNA
aggagcagacatctgt

SEQ ID NO: 1518 - DNA, 16 bp, synthetic construct
  source 1..16: mol_type = other DNA
gggtttcccacccaag

SEQ ID NO: 1519 - DNA, 16 bp, synthetic construct
  source 1..16: mol_type = other DNA
ggaattgcctaagtaa

SEQ ID NO: 1520 - DNA, 16 bp, synthetic construct
  source 1..16: mol_type = other DNA
gccctagccctcggga

SEQ ID NO: 1521 - DNA, 16 bp, synthetic construct
  source 1..16: mol_type = other DNA
tagccctagccctcgg

SEQ ID NO: 1522 - DNA, 16 bp, synthetic construct
  source 1..16: mol_type = other DNA
tttacttacccgggtc

SEQ ID NO: 1523 - DNA, 16 bp, synthetic construct
  source 1..16: mol_type = other DNA
cctttacttacccggg

SEQ ID NO: 1524 - DNA, 16 bp, synthetic construct
  source 1..16: mol_type = other DNA
ctgcctttacttaccc

SEQ ID NO: 1525 - DNA, 16 bp, synthetic construct
  source 1..16: mol_type = other DNA
ggctagaggagccctg

SEQ ID NO: 1526 - DNA, 16 bp, synthetic construct
  source 1..16: mol_type = other DNA
gaggctagaggagccc

SEQ ID NO: 1527 - DNA, 16 bp, synthetic construct
  source 1..16: mol_type = other DNA
ggtatgaggctagagg

SEQ ID NO: 1528 - DNA, 16 bp, synthetic construct
  source 1..16: mol_type = other DNA
cgggtatgaggctaga

SEQ ID NO: 1529 - DNA, 16 bp, synthetic construct
  source 1..16: mol_type = other DNA
cacgggtatgaggcta

SEQ ID NO: 1530 - DNA, 16 bp, synthetic construct
  source 1..16: mol_type = other DNA
catgtagaggtatgaa

SEQ ID NO: 1531 - DNA, 16 bp, synthetic construct
  source 1..16: mol_type = other DNA
gacatgtagaggtatg

SEQ ID NO: 1532 - DNA, 16 bp, synthetic construct
  source 1..16: mol_type = other DNA
aatatctcaagcagac

SEQ ID NO: 1533 - DNA, 16 bp, synthetic construct
  source 1..16: mol_type = other DNA
ggaaactttcaggctg

SEQ ID NO: 1534 - DNA, 16 bp, synthetic construct
  source 1..16: mol_type = other DNA
gggaaactttcaggct

SEQ ID NO: 1535 - DNA, 16 bp, synthetic construct
  source 1..16: mol_type = other DNA
ctggcagatggttggg

SEQ ID NO: 1536 - DNA, 16 bp, synthetic construct
  source 1..16: mol_type = other DNA
ctctggcagatggttg

SEQ ID NO: 1537 - DNA, 16 bp, synthetic construct
  source 1..16: mol_type = other DNA
gagttctctggcagat

SEQ ID NO: 1538 - DNA, 16 bp, synthetic construct
  source 1..16: mol_type = other DNA
aggagttctctggcag

SEQ ID NO: 1539 - DNA, 16 bp, synthetic construct
  source 1..16: mol_type = other DNA
taggagttctctggca

SEQ ID NO: 1540 - DNA, 16 bp, synthetic construct
  source 1..16: mol_type = other DNA
gcataggagttctctg

SEQ ID NO: 1541 - DNA, 16 bp, synthetic construct
  source 1..16: mol_type = other DNA
tgcataggagttctct

SEQ ID NO: 1542 - DNA, 16 bp, synthetic construct
  source 1..16: mol_type = other DNA
ctgagcagggttctaa

SEQ ID NO: 1543 - DNA, 16 bp, synthetic construct
  source 1..16: mol_type = other DNA
tctgagcagggttcta

SEQ ID NO: 1544 - DNA, 16 bp, synthetic construct
  source 1..16: mol_type = other DNA
gtgtctgagcagggtt

SEQ ID NO: 1545 - DNA, 16 bp, synthetic construct
  source 1..16: mol_type = other DNA
taatggtgtctgagca

SEQ ID NO: 1546 - DNA, 16 bp, synthetic construct
  source 1..16: mol_type = other DNA
gtaatggtgtctgagc

SEQ ID NO: 1547 - DNA, 16 bp, synthetic construct
  source 1..16: mol_type = other DNA
gacaagatgtggcaga

SEQ ID NO: 1548 - DNA, 16 bp, synthetic construct
  source 1..16: mol_type = other DNA
gcggagtgatcaattt

SEQ ID NO: 1549 - DNA, 16 bp, synthetic construct
  source 1..16: mol_type = other DNA
aggcggagtgatcaat

SEQ ID NO: 1550 - DNA, 16 bp, synthetic construct
  source 1..16: mol_type = other DNA
tgctacgggagcccag

SEQ ID NO: 1551 - DNA, 16 bp, synthetic construct
  source 1..16: mol_type = other DNA
gtgctacgggagccca

SEQ ID NO: 1552 - DNA, 16 bp, synthetic construct
  source 1..16: mol_type = other DNA
tgttatagtgtgctac

SEQ ID NO: 1553 - DNA, 16 bp, synthetic construct
  source 1..16: mol_type = other DNA
atgttatagtgtgcta

SEQ ID NO: 1554 - DNA, 16 bp, synthetic construct
  source 1..16: mol_type = other DNA
gatgttatagtgtgct

SEQ ID NO: 1555 - DNA, 16 bp, synthetic construct
  source 1..16: mol_type = other DNA
agatgttatagtgtgc

SEQ ID NO: 1556 - DNA, 16 bp, synthetic construct
  source 1..16: mol_type = other DNA
cagatgttatagtgtg

SEQ ID NO: 1557 - DNA, 16 bp, synthetic construct
  source 1..16: mol_type = other DNA
agcagatgttatagtg

SEQ ID NO: 1558 - DNA, 16 bp, synthetic construct
  source 1..16: mol_type = other DNA
cagcagatgttatagt

SEQ ID NO: 1559 - DNA, 16 bp, synthetic construct
  source 1..16: mol_type = other DNA
ccagcagatgttatag

SEQ ID NO: 1560 - DNA, 16 bp, synthetic construct
  source 1..16: mol_type = other DNA
agcaacactccagcag

SEQ ID NO: 1561 - DNA, 16 bp, synthetic construct
  source 1..16: mol_type = other DNA
cagcaacactccagca

SEQ ID NO: 1562 - DNA, 16 bp, synthetic construct
  source 1..16: mol_type = other DNA
aaagtatggtgcaaca

SEQ ID NO: 1563 - DNA, 16 bp, synthetic construct
  source 1..16: mol_type = other DNA
gaaagtatggtgcaac

SEQ ID NO: 1564 - DNA, 16 bp, synthetic construct
  source 1..16: mol_type = other DNA
agaaagtatggtgcaa

SEQ ID NO: 1565 - DNA, 16 bp, synthetic construct
  source 1..16: mol_type = other DNA
ggcacttacagtctag

SEQ ID NO: 1566 - DNA, 16 bp, synthetic construct
  source 1..16: mol_type = other DNA
gcaaggcacttacagt

SEQ ID NO: 1567 - DNA, 16 bp, synthetic construct
  source 1..16: mol_type = other DNA
ccgcaaggcacttaca

SEQ ID NO: 1568 - DNA, 16 bp, synthetic construct
  source 1..16: mol_type = other DNA
accgcaaggcacttac

SEQ ID NO: 1569 - DNA, 16 bp, synthetic construct
  source 1..16: mol_type = other DNA
ctgaccgcaaggcact

SEQ ID NO: 1570 - DNA, 16 bp, synthetic construct
  source 1..16: mol_type = other DNA
cctgaccgcaaggcac

SEQ ID NO: 1571 - DNA, 16 bp, synthetic construct
  source 1..16: mol_type = other DNA
aagattcagtccctga

SEQ ID NO: 1572 - DNA, 16 bp, synthetic construct
  source 1..16: mol_type = other DNA
gcaagattcagtccct

SEQ ID NO: 1573 - DNA, 16 bp, synthetic construct
  source 1..16: mol_type = other DNA
ggcaagattcagtccc

SEQ ID NO: 1574 - DNA, 16 bp, synthetic construct
  source 1..16: mol_type = other DNA
gggcaagattcagtcc

SEQ ID NO: 1575 - DNA, 16 bp, synthetic construct
  source 1..16: mol_type = other DNA
cgggcaagattcagtc

SEQ ID NO: 1576 - DNA, 16 bp, synthetic construct
  source 1..16: mol_type = other DNA
acgggcaagattcagt

SEQ ID NO: 1577 - DNA, 16 bp, synthetic construct
  source 1..16: mol_type = other DNA
aacgggcaagattcag

SEQ ID NO: 1578 - DNA, 16 bp, synthetic construct
  source 1..16: mol_type = other DNA
cataaacgggcaagat

SEQ ID NO: 1579 - DNA, 16 bp, synthetic construct
  source 1..16: mol_type = other DNA
acataaacgggcaaga

SEQ ID NO: 1580 - DNA, 16 bp, synthetic construct
  source 1..16: mol_type = other DNA
gggctagacatggagc

SEQ ID NO: 1581 - DNA, 16 bp, synthetic construct
  source 1..16: mol_type = other DNA
gatgggctagacatgg

SEQ ID NO: 1582 - DNA, 16 bp, synthetic construct
  source 1..16: mol_type = other DNA
atgatgggctagacat

SEQ ID NO: 1583 - DNA, 16 bp, synthetic construct
  source 1..16: mol_type = other DNA
ttgctccaagcaggat

SEQ ID NO: 1584 - DNA, 16 bp, synthetic construct
  source 1..16: mol_type = other DNA
cttgctccaagcagga

SEQ ID NO: 1585 - DNA, 16 bp, synthetic construct
  source 1..16: mol_type = other DNA
ctacttgctccaagca

SEQ ID NO: 1586 - DNA, 16 bp, synthetic construct
  source 1..16: mol_type = other DNA
gcctacttgctccaag

SEQ ID NO: 1587 - DNA, 16 bp, synthetic construct
  source 1..16: mol_type = other DNA
attgagctcctgccta

SEQ ID NO: 1588 - DNA, 16 bp, synthetic construct
  source 1..16: mol_type = other DNA
tacctccccttggaag

SEQ ID NO: 1589 - DNA, 16 bp, synthetic construct
  source 1..16: mol_type = other DNA
gatacctccccttgga

SEQ ID NO: 1590 - DNA, 16 bp, synthetic construct
  source 1..16: mol_type = other DNA
cccttgatactgctca

SEQ ID NO: 1591 - DNA, 16 bp, synthetic construct
  source 1..16: mol_type = other DNA
ccccttgatactgctc

SEQ ID NO: 1592 - DNA, 16 bp, synthetic construct
  source 1..16: mol_type = other DNA
tgttccccttgatact

SEQ ID NO: 1593 - DNA, 16 bp, synthetic construct
  source 1..16: mol_type = other DNA
ttgttccccttgatac

SEQ ID NO: 1594 - DNA, 16 bp, synthetic construct
  source 1..16: mol_type = other DNA
cttgttccccttgata

SEQ ID NO: 1595 - DNA, 16 bp, synthetic construct
  source 1..16: mol_type = other DNA
agcttgttccccttga

SEQ ID NO: 1596 - DNA, 16 bp, synthetic construct
  source 1..16: mol_type = other DNA
cagcttgttccccttg

SEQ ID NO: 1597 - DNA, 16 bp, synthetic construct
  source 1..16: mol_type = other DNA
ccagcttgttcccctt

SEQ ID NO: 1598 - DNA, 16 bp, synthetic construct
  source 1..16: mol_type = other DNA
ttgtcctagcacctcc

SEQ ID NO: 1599 - DNA, 16 bp, synthetic construct
  source 1..16: mol_type = other DNA
gttttgtcctagcacc

SEQ ID NO: 1600 - DNA, 16 bp, synthetic construct
  source 1..16: mol_type = other DNA
gatagggccacctttc

SEQ ID NO: 1601 - DNA, 16 bp, synthetic construct
  source 1..16: mol_type = other DNA
ctgatagggccacctt

SEQ ID NO: 1602 - DNA, 16 bp, synthetic construct
  source 1..16: mol_type = other DNA
tccctgatagggccac

SEQ ID NO: 1603 - DNA, 16 bp, synthetic construct
  source 1..16: mol_type = other DNA
cttccctgatagggcc

SEQ ID NO: 1604 - DNA, 16 bp, synthetic construct
  source 1..16: mol_type = other DNA
tgcttccctgataggg

SEQ ID NO: 1605 - DNA, 16 bp, synthetic construct
  source 1..16: mol_type = other DNA
aacggcctctcctctg

SEQ ID NO: 1606 - DNA, 16 bp, synthetic construct
  source 1..16: mol_type = other DNA
gaacggcctctcctct

SEQ ID NO: 1607 - DNA, 16 bp, synthetic construct
  source 1..16: mol_type = other DNA
tagaacggcctctcct

SEQ ID NO: 1608 - DNA, 16 bp, synthetic construct
  source 1..16: mol_type = other DNA
ggcttccctagaacgg

SEQ ID NO: 1609 - DNA, 16 bp, synthetic construct
  source 1..16: mol_type = other DNA
ctgggcttccctagaa

SEQ ID NO: 1610 - DNA, 16 bp, synthetic construct
  source 1..16: mol_type = other DNA
gggccaaaagtgccgg

SEQ ID NO: 1611 - DNA, 16 bp, synthetic construct
  source 1..16: mol_type = other DNA
gacctgcgggagttgg

SEQ ID NO: 1612 - DNA, 16 bp, synthetic construct
  source 1..16: mol_type = other DNA
cagacctgcgggagtt

SEQ ID NO: 1613 - DNA, 16 bp, synthetic construct
  source 1..16: mol_type = other DNA
gcagacctgcgggagt

SEQ ID NO: 1614 - DNA, 16 bp, synthetic construct
  source 1..16: mol_type = other DNA
gcgcccacattctccc

SEQ ID NO: 1615 - DNA, 16 bp, synthetic construct
  source 1..16: mol_type = other DNA
cctgcgcccacattct

SEQ ID NO: 1616 - DNA, 16 bp, synthetic construct
  source 1..16: mol_type = other DNA
ccctgcgcccacattc

SEQ ID NO: 1617 - DNA, 16 bp, synthetic construct
  source 1..16: mol_type = other DNA
ccaccctgcgcccaca

SEQ ID NO: 1618 - DNA, 16 bp, synthetic construct
  source 1..16: mol_type = other DNA
ggaacccgagtgaggc

SEQ ID NO: 1619 - DNA, 16 bp, synthetic construct
  source 1..16: mol_type = other DNA
tggaacccgagtgagg

SEQ ID NO: 1620 - DNA, 16 bp, synthetic construct
  source 1..16: mol_type = other DNA
cccttcatgagccccg

SEQ ID NO: 1621 - DNA, 16 bp, synthetic construct
  source 1..16: mol_type = other DNA
ccccttcatgagcccc

SEQ ID NO: 1622 - DNA, 16 bp, synthetic construct
  source 1..16: mol_type = other DNA
agcttgttccccttca

SEQ ID NO: 1623 - DNA, 16 bp, synthetic construct
  source 1..16: mol_type = other DNA
cagcttgttccccttc

SEQ ID NO: 1624 - DNA, 16 bp, synthetic construct
  source 1..16: mol_type = other DNA
ctgcaataaggtgctc

SEQ ID NO: 1625 - DNA, 16 bp, synthetic construct
  source 1..16: mol_type = other DNA
gggcatggtcctccct

SEQ ID NO: 1626 - DNA, 16 bp, synthetic construct
  source 1..16: mol_type = other DNA
gtccttacattgggca

SEQ ID NO: 1627 - DNA, 16 bp, synthetic construct
  source 1..16: mol_type = other DNA
cctagaaactccagtc

SEQ ID NO: 1628 - DNA, 16 bp, synthetic construct
  source 1..16: mol_type = other DNA
ggctatctacttagcg

SEQ ID NO: 1629 - DNA, 16 bp, synthetic construct
  source 1..16: mol_type = other DNA
ataggagcagagctat

SEQ ID NO: 1630 - DNA, 16 bp, synthetic construct
  source 1..16: mol_type = other DNA
gtgcagatctcagatt

SEQ ID NO: 1631 - DNA, 16 bp, synthetic construct
  source 1..16: mol_type = other DNA
acggacttctaacaaa

SEQ ID NO: 1632 - DNA, 16 bp, synthetic construct
  source 1..16: mol_type = other DNA
aggagataggcctgca

SEQ ID NO: 1633 - DNA, 16 bp, synthetic construct
  source 1..16: mol_type = other DNA
attgatacacaccggg

SEQ ID NO: 1634 - DNA, 16 bp, synthetic construct
  source 1..16: mol_type = other DNA
gtgcaggaatgtggtc

SEQ ID NO: 1635 - DNA, 16 bp, synthetic construct
  source 1..16: mol_type = other DNA
gggaaggctgccgctt

SEQ ID NO: 1636 - DNA, 16 bp, synthetic construct
  source 1..16: mol_type = other DNA
ctgcacgcggcaggga

SEQ ID NO: 1637 - DNA, 16 bp, synthetic construct
  source 1..16: mol_type = other DNA
aggagactcgggagag

SEQ ID NO: 1638 - DNA, 16 bp, synthetic construct
  source 1..16: mol_type = other DNA
aaggagtggagtgcca

SEQ ID NO: 1639 - DNA, 16 bp, synthetic construct
  source 1..16: mol_type = other DNA
ccaaacttaatgcagc

SEQ ID NO: 1640 - DNA, 16 bp, synthetic construct
  source 1..16: mol_type = other DNA
ccaaagggagtctgtc

SEQ ID NO: 1641 - DNA, 16 bp, synthetic construct
  source 1..16: mol_type = other DNA
gcaaatagaaggagcc

SEQ ID NO: 1642 - DNA, 16 bp, synthetic construct
  source 1..16: mol_type = other DNA
actgagtgagtagagg

SEQ ID NO: 1643 - DNA, 16 bp, synthetic construct
  source 1..16: mol_type = other DNA
gggacagcgaaggaca

SEQ ID NO: 1644 - DNA, 16 bp, synthetic construct
  source 1..16: mol_type = other DNA
acaatagagagggaca

SEQ ID NO: 1645 - DNA, 16 bp, synthetic construct
  source 1..16: mol_type = other DNA
gcccacagctaggagg

SEQ ID NO: 1646 - DNA, 16 bp, synthetic construct
  source 1..16: mol_type = other DNA
agtagaaggatcctga

SEQ ID NO: 1647 - DNA, 16 bp, synthetic construct
  source 1..16: mol_type = other DNA
tggcagccaaacctct

SEQ ID NO: 1648 - DNA, 16 bp, synthetic construct
  source 1..16: mol_type = other DNA
tcccaggttgcggctg

SEQ ID NO: 1649 - DNA, 16 bp, synthetic construct
  source 1..16: mol_type = other DNA
cctgacctcgagctgt

SEQ ID NO: 1650 - DNA, 16 bp, synthetic construct
  source 1..16: mol_type = other DNA
cttatactttgctggc

SEQ ID NO: 1651 - DNA, 16 bp, synthetic construct
  source 1..16: mol_type = other DNA
ggtggacgaggtctta

SEQ ID NO: 1652 - DNA, 16 bp, synthetic construct
  source 1..16: mol_type = other DNA
ctgcacggtctcgcct

SEQ ID NO: 1653 - DNA, 16 bp, synthetic construct
  source 1..16: mol_type = other DNA
ccctaacctccacgat

SEQ ID NO: 1654 - DNA, 16 bp, synthetic construct
  source 1..16: mol_type = other DNA
ctgtaaggcccctgcc

SEQ ID NO: 1655 - DNA, 16 bp, synthetic construct
  source 1..16: mol_type = other DNA
gggcaggtcaacagtg

SEQ ID NO: 1656 - DNA, 16 bp, synthetic construct
  source 1..16: mol_type = other DNA
gtaaaggtcaggcacc

SEQ ID NO: 1657 - DNA, 16 bp, synthetic construct
  source 1..16: mol_type = other DNA
ccgatgaaacccaaaa

SEQ ID NO: 1658 - DNA, 16 bp, synthetic construct
  source 1..16: mol_type = other DNA
cgcttaccacctgctc

SEQ ID NO: 1659 - DNA, 16 bp, synthetic construct
  source 1..16: mol_type = other DNA
aggtatacaaaagcac

SEQ ID NO: 1660 - DNA, 16 bp, synthetic construct
  source 1..16: mol_type = other DNA
gtacactaactcacca

SEQ ID NO: 1661 - DNA, 16 bp, synthetic construct
  source 1..16: mol_type = other DNA
aaagattttgcactcc

SEQ ID NO: 1662 - DNA, 16 bp, synthetic construct
  source 1..16: mol_type = other DNA
acccacacccataaag

SEQ ID NO: 1663 - DNA, 16 bp, synthetic construct
  source 1..16: mol_type = other DNA
taccaatatgtgcaca

SEQ ID NO: 1664 - DNA, 16 bp, synthetic construct
  source 1..16: mol_type = other DNA
tcgcacacataccaat

SEQ ID NO: 1665 - DNA, 16 bp, synthetic construct
  source 1..16: mol_type = other DNA
cagcatccaaaatcgc

SEQ ID NO: 1666 - DNA, 16 bp, synthetic construct
  source 1..16: mol_type = other DNA
acccacagcatgacca

SEQ ID NO: 1667 - DNA, 16 bp, synthetic construct
  source 1..16: mol_type = other DNA
atggaatatacgaagg

SEQ ID NO: 1668 - DNA, 16 bp, synthetic construct
  source 1..16: mol_type = other DNA
acgaaatgacctggct

SEQ ID NO: 1669 - DNA, 16 bp, synthetic construct
  source 1..16: mol_type = other DNA
ggacattatacagacg

SEQ ID NO: 1670 - DNA, 16 bp, synthetic construct
  source 1..16: mol_type = other DNA
caccaaggcctaaagg

SEQ ID NO: 1671 - DNA, 16 bp, synthetic construct
  source 1..16: mol_type = other DNA
ggcctcacccgattca

SEQ ID NO: 1672 - DNA, 16 bp, synthetic construct
  source 1..16: mol_type = other DNA
taagaactgtgcaggc

SEQ ID NO: 1673 - DNA, 16 bp, synthetic construct
  source 1..16: mol_type = other DNA
gtctagggccccgcat

SEQ ID NO: 1674 - DNA, 16 bp, synthetic construct
  source 1..16: mol_type = other DNA
gggcttatggcttcct

SEQ ID NO: 1675 - DNA, 16 bp, synthetic construct
  source 1..16: mol_type = other DNA
ctcctaggtgttctct

SEQ ID NO: 1676 - DNA, 16 bp, synthetic construct
  source 1..16: mol_type = other DNA
tgcttggtgggtgttg

SEQ ID NO: 1677 - DNA, 16 bp, synthetic construct
  source 1..16: mol_type = other DNA
gtcaagtgtgtagtgc

SEQ ID NO: 1678 - DNA, 16 bp, synthetic construct
  source 1..16: mol_type = other DNA
gctttagggtgtagca

SEQ ID NO: 1679 - DNA, 16 bp, synthetic construct
  source 1..16: mol_type = other DNA
gtctataaagcaccca

SEQ ID NO: 1680 - DNA, 16 bp, synthetic construct
  source 1..16: mol_type = other DNA
gctaacctgagatgcc

SEQ ID NO: 1681 - DNA, 16 bp, synthetic construct
  source 1..16: mol_type = other DNA
cactaggtttgtgact

SEQ ID NO: 1682 - DNA, 16 bp, synthetic construct
  source 1..16: mol_type = other DNA
aatcaaacacactagg

SEQ ID NO: 1683 - DNA, 16 bp, synthetic construct
  source 1..16: mol_type = other DNA
gggtaaaagagctttg

SEQ ID NO: 1684 - DNA, 16 bp, synthetic construct
  source 1..16: mol_type = other DNA
ccctacttaaagtgta

SEQ ID NO: 1685 - DNA, 16 bp, synthetic construct
  source 1..16: mol_type = other DNA
cctgacaaattgtcct

SEQ ID NO: 1686 - DNA, 16 bp, synthetic construct
  source 1..16: mol_type = other DNA
ttaacctgtttacctc

SEQ ID NO: 1687 - DNA, 16 bp, synthetic construct
  source 1..16: mol_type = other DNA
tcccggtgattcactc

SEQ ID NO: 1688 - DNA, 16 bp, synthetic construct
  source 1..16: mol_type = other DNA
aaccgatctcctcggt

SEQ ID NO: 1689 - DNA, 16 bp, synthetic construct
  source 1..16: mol_type = other DNA
ctctagctcatcaacc

SEQ ID NO: 1690 - DNA, 16 bp, synthetic construct
  source 1..16: mol_type = other DNA
ccctagctcagggctt

SEQ ID NO: 1691 - DNA, 16 bp, synthetic construct
  source 1..16: mol_type = other DNA
acaggcagggacggcc

SEQ ID NO: 1692 - DNA, 16 bp, synthetic construct
  source 1..16: mol_type = other DNA
atgcagggtctgcccg

SEQ ID NO: 1693 - DNA, 16 bp, synthetic construct
  source 1..16: mol_type = other DNA
ctcaacagtccaggct

SEQ ID NO: 1694 - DNA, 16 bp, synthetic construct
  source 1..16: mol_type = other DNA
ggttagagggatgtca

SEQ ID NO: 1695 - DNA, 16 bp, synthetic construct
  source 1..16: mol_type = other DNA
caccatggcagggtta

SEQ ID NO: 1696 - DNA, 16 bp, synthetic construct
  source 1..16: mol_type = other DNA
agccgcctaggcccca

SEQ ID NO: 1697 - DNA, 16 bp, synthetic construct
  source 1..16: mol_type = other DNA
gcccatgctcatccta

SEQ ID NO: 1698 - DNA, 16 bp, synthetic construct
  source 1..16: mol_type = other DNA
ccaggacggagcagca

SEQ ID NO: 1699 - DNA, 16 bp, synthetic construct
  source 1..16: mol_type = other DNA
aactaggcaaattccc

SEQ ID NO: 1700 - DNA, 16 bp, synthetic construct
  source 1..16: mol_type = other DNA
tagaaattcctatagc

SEQ ID NO: 1701 - DNA, 16 bp, synthetic construct
  source 1..16: mol_type = other DNA
catgaccccgtgatac

SEQ ID NO: 1702 - DNA, 16 bp, synthetic construct
  source 1..16: mol_type = other DNA
tatgataaattagccg

SEQ ID NO: 1703 - DNA, 16 bp, synthetic construct
  source 1..16: mol_type = other DNA
gacggaatggccgggc

SEQ ID NO: 1704 - DNA, 16 bp, synthetic construct
  source 1..16: mol_type = other DNA
tggcataagataagac

SEQ ID NO: 1705 - DNA, 16 bp, synthetic construct
  source 1..16: mol_type = other DNA
ccaaaaggtctactgc

SEQ ID NO: 1706 - DNA, 16 bp, synthetic construct
  source 1..16: mol_type = other DNA
ttccatagggccccac

SEQ ID NO: 1707 - DNA, 16 bp, synthetic construct
  source 1..16: mol_type = other DNA
cactgatgagcccccc

SEQ ID NO: 1708 - DNA, 16 bp, synthetic construct
  source 1..16: mol_type = other DNA
cctgccaccctacgcg

SEQ ID NO: 1709 - DNA, 16 bp, synthetic construct
  source 1..16: mol_type = other DNA
tcctgccaccctacgc

SEQ ID NO: 1710 - DNA, 16 bp, synthetic construct
  source 1..16: mol_type = other DNA
ccctacacgcctccct

SEQ ID NO: 1711 - DNA, 16 bp, synthetic construct
  source 1..16: mol_type = other DNA
tcaatctggttgtcac

SEQ ID NO: 1712 - DNA, 16 bp, synthetic construct
  source 1..16: mol_type = other DNA
tctcatcaccaacttc

SEQ ID NO: 1713 - DNA, 16 bp, synthetic construct
  source 1..16: mol_type = other DNA
aagaatccagatcccc

SEQ ID NO: 1714 - DNA, 16 bp, synthetic construct
  source 1..16: mol_type = other DNA
agcgaatttgcctttc

SEQ ID NO: 1715 - DNA, 16 bp, synthetic construct
  source 1..16: mol_type = other DNA
gcccaggaaagcgaat

SEQ ID NO: 1716 - DNA, 16 bp, synthetic construct
  source 1..16: mol_type = other DNA
tcgactatcaggaaga

SEQ ID NO: 1717 - DNA, 16 bp, synthetic construct
  source 1..16: mol_type = other DNA
gtgaagagaccatcga

SEQ ID NO: 1718 - DNA, 16 bp, synthetic construct
  source 1..16: mol_type = other DNA
gggtaagtgacccagc

SEQ ID NO: 1719 - DNA, 16 bp, synthetic construct
  source 1..16: mol_type = other DNA
gaaagagcacccaagc

SEQ ID NO: 1720 - DNA, 16 bp, synthetic construct
  source 1..16: mol_type = other DNA
taccgttagccactgt

SEQ ID NO: 1721 - DNA, 16 bp, synthetic construct
  source 1..16: mol_type = other DNA
cttcagtgtaacacag

SEQ ID NO: 1722 - DNA, 16 bp, synthetic construct
  source 1..16: mol_type = other DNA
ctttaggacaaacttt

SEQ ID NO: 1723 - DNA, 16 bp, synthetic construct
  source 1..16: mol_type = other DNA
tcactatgcatgaaga

SEQ ID NO: 1724 - DNA, 16 bp, synthetic construct
  source 1..16: mol_type = other DNA
atctagttaggtggca

SEQ ID NO: 1725 - DNA, 16 bp, synthetic construct
  source 1..16: mol_type = other DNA
aggtaggttatagtgt

SEQ ID NO: 1726 - DNA, 16 bp, synthetic construct
  source 1..16: mol_type = other DNA
tgctataaaggtaggt

SEQ ID NO: 1727 - DNA, 16 bp, synthetic construct
  source 1..16: mol_type = other DNA
tgacaagtgggctgcc

SEQ ID NO: 1728 - DNA, 16 bp, synthetic construct
  source 1..16: mol_type = other DNA
gtacagaaacacccgg

SEQ ID NO: 1729 - DNA, 16 bp, synthetic construct
  source 1..16: mol_type = other DNA
aacggaagtaaggtac

SEQ ID NO: 1730 - DNA, 16 bp, synthetic construct
  source 1..16: mol_type = other DNA
cgtttatcgagcactt

SEQ ID NO: 1731 - DNA, 16 bp, synthetic construct
  source 1..16: mol_type = other DNA
ggcaagcatagctagc

SEQ ID NO: 1732 - DNA, 16 bp, synthetic construct
  source 1..16: mol_type = other DNA
gtgtgtttggcattct

SEQ ID NO: 1733 - DNA, 16 bp, synthetic construct
  source 1..16: mol_type = other DNA
ggtgtgtttggcattc

SEQ ID NO: 1734 - DNA, 16 bp, synthetic construct
  source 1..16: mol_type = other DNA
aggtgtgtttggcatt

SEQ ID NO: 1735 - DNA, 16 bp, synthetic construct
  source 1..16: mol_type = other DNA
gccttaggcatcagct

SEQ ID NO: 1736 - DNA, 16 bp, synthetic construct
  source 1..16: mol_type = other DNA
gtctagctggctgggc

SEQ ID NO: 1737 - DNA, 16 bp, synthetic construct
  source 1..16: mol_type = other DNA
aaccaccgtctagtcc

SEQ ID NO: 1738 - DNA, 16 bp, synthetic construct
  source 1..16: mol_type = other DNA
ccagaacaaggttgtt

SEQ ID NO: 1739 - DNA, 16 bp, synthetic construct
  source 1..16: mol_type = other DNA
tcagatttaatgggtc

SEQ ID NO: 1740 - DNA, 16 bp, synthetic construct
  source 1..16: mol_type = other DNA
aaccagttgatagaga

SEQ ID NO: 1741 - DNA, 16 bp, synthetic construct
  source 1..16: mol_type = other DNA
atacgaattctatgaa

SEQ ID NO: 1742 - DNA, 16 bp, synthetic construct
  source 1..16: mol_type = other DNA
tcccatttatacgaat

SEQ ID NO: 1743 - DNA, 16 bp, synthetic construct
  source 1..16: mol_type = other DNA
ccagaataggctcatc

SEQ ID NO: 1744 - DNA, 16 bp, synthetic construct
  source 1..16: mol_type = other DNA
gctcaaatcaggcagc

SEQ ID NO: 1745 - DNA, 16 bp, synthetic construct
  source 1..16: mol_type = other DNA
gcaaagaacgatgctc

SEQ ID NO: 1746 - DNA, 16 bp, synthetic construct
  source 1..16: mol_type = other DNA
taacagagttgacttg

SEQ ID NO: 1747 - DNA, 16 bp, synthetic construct
  source 1..16: mol_type = other DNA
tggtattagaatgtgc

SEQ ID NO: 1748 - DNA, 16 bp, synthetic construct
  source 1..16: mol_type = other DNA
acgacgaaaccttgta

SEQ ID NO: 1749 - DNA, 16 bp, synthetic construct
  source 1..16: mol_type = other DNA
gtgtttggcattctag

SEQ ID NO: 1750 - DNA, 16 bp, synthetic construct
  source 1..16: mol_type = other DNA
accatataacccatcc

SEQ ID NO: 1751 - DNA, 16 bp, synthetic construct
  source 1..16: mol_type = other DNA
atgatacgatcatttt

SEQ ID NO: 1752 - DNA, 16 bp, synthetic construct
  source 1..16: mol_type = other DNA
ctgtacacagctagtg

SEQ ID NO: 1753 - DNA, 16 bp, synthetic construct
  source 1..16: mol_type = other DNA
cgaacagacctacatt

SEQ ID NO: 1754 - DNA, 16 bp, synthetic construct
  source 1..16: mol_type = other DNA
ccgaacagacctacat

SEQ ID NO: 1755 - DNA, 16 bp, synthetic construct
  source 1..16: mol_type = other DNA
agccgaacagacctac

SEQ ID NO: 1756 - DNA, 16 bp, synthetic construct
  source 1..16: mol_type = other DNA
tgaacagacctacatt

SEQ ID NO: 1757 - DNA, 16 bp, synthetic construct
  source 1..16: mol_type = other DNA
atgaacagacctacat

SEQ ID NO: 1758 - DNA, 16 bp, synthetic construct
  source 1..16: mol_type = other DNA
agtaggcactttatga

SEQ ID NO: 1759 - DNA, 16 bp, synthetic construct
  source 1..16: mol_type = other DNA
ccgtatgtagtaggca

SEQ ID NO: 1760 - DNA, 16 bp, synthetic construct
  source 1..16: mol_type = other DNA
ctagaacaaccgtatg

SEQ ID NO: 1761 - DNA, 16 bp, synthetic construct
  source 1..16: mol_type = other DNA
cctagaacaaccgtat

SEQ ID NO: 1762 - DNA, 16 bp, synthetic construct
  source 1..16: mol_type = other DNA
ccctagaacaaccgta

SEQ ID NO: 1763 - DNA, 16 bp, synthetic construct
  source 1..16: mol_type = other DNA
tccctagaacaaccgt

SEQ ID NO: 1764 - DNA, 16 bp, synthetic construct
  source 1..16: mol_type = other DNA
tggaagatatcttcct

SEQ ID NO: 1765 - DNA, 16 bp, synthetic construct
  source 1..16: mol_type = other DNA
ccttatgctatacagg

SEQ ID NO: 1766 - DNA, 16 bp, synthetic construct
  source 1..16: mol_type = other DNA
gaatactgtattggaa

SEQ ID NO: 1767 - DNA, 16 bp, synthetic construct
  source 1..16: mol_type = other DNA
tgttagcaggttctgc

SEQ ID NO: 1768 - DNA, 16 bp, synthetic construct
  source 1..16: mol_type = other DNA
acaatgcggttcttgg

SEQ ID NO: 1769 - DNA, 16 bp, synthetic construct
  source 1..16: mol_type = other DNA
ctaagacttatctgga

SEQ ID NO: 1770 - DNA, 16 bp, synthetic construct
  source 1..16: mol_type = other DNA
tgcatttaggccgggt

SEQ ID NO: 1771 - DNA, 16 bp, synthetic construct
  source 1..16: mol_type = other DNA
ttgcagggtacacaac

SEQ ID NO: 1772 - DNA, 16 bp, synthetic construct
  source 1..16: mol_type = other DNA
ctgaacaaggttgcag

SEQ ID NO: 1773 - DNA, 16 bp, synthetic construct
  source 1..16: mol_type = other DNA
tagaactaacaaactg

SEQ ID NO: 1774 - DNA, 16 bp, synthetic construct
  source 1..16: mol_type = other DNA
ggcctgagggatgtca

SEQ ID NO: 1775 - DNA, 16 bp, synthetic construct
  source 1..16: mol_type = other DNA
catcatgaaagtccag

SEQ ID NO: 1776 - DNA, 16 bp, synthetic construct
  source 1..16: mol_type = other DNA
caccgaaatcaagagt

SEQ ID NO: 1777 - DNA, 16 bp, synthetic construct
  source 1..16: mol_type = other DNA
tgccgcttggcaccga

SEQ ID NO: 1778 - DNA, 16 bp, synthetic construct
  source 1..16: mol_type = other DNA
acccaggtcatcccgc

SEQ ID NO: 1779 - DNA, 16 bp, synthetic construct
  source 1..16: mol_type = other DNA
acccggaacttgtctg

SEQ ID NO: 1780 - DNA, 16 bp, synthetic construct
  source 1..16: mol_type = other DNA
cccaaaagcttgggca

SEQ ID NO: 1781 - DNA, 16 bp, synthetic construct
  source 1..16: mol_type = other DNA
acataggaccccaggg

SEQ ID NO: 1782 - DNA, 16 bp, synthetic construct
  source 1..16: mol_type = other DNA
tcccactagtgggcac

SEQ ID NO: 1783 - DNA, 16 bp, synthetic construct
  source 1..16: mol_type = other DNA
tcctaactgagtccca

SEQ ID NO: 1784 - DNA, 16 bp, synthetic construct
  source 1..16: mol_type = other DNA
tcacgctggagggtcc

SEQ ID NO: 1785 - DNA, 16 bp, synthetic construct
  source 1..16: mol_type = other DNA
tgttagcccagttctc

SEQ ID NO: 1786 - DNA, 16 bp, synthetic construct
  source 1..16: mol_type = other DNA
ctatcttgggctgtta

SEQ ID NO: 1787 - DNA, 16 bp, synthetic construct
  source 1..16: mol_type = other DNA
ggcagacgagctcact

SEQ ID NO: 1788 - DNA, 16 bp, synthetic construct
  source 1..16: mol_type = other DNA
gactgagggatcaaga

SEQ ID NO: 1789 - DNA, 16 bp, synthetic construct
  source 1..16: mol_type = other DNA
tgcctagggtggaagg

SEQ ID NO: 1790 - DNA, 16 bp, synthetic construct
  source 1..16: mol_type = other DNA
gactagagtcagaggg

SEQ ID NO: 1791 - DNA, 16 bp, synthetic construct
  source 1..16: mol_type = other DNA
tctggttgcactggac

SEQ ID NO: 1792 - DNA, 16 bp, synthetic construct
  source 1..16: mol_type = other DNA
ttctggttgcactgga

SEQ ID NO: 1793 - DNA, 16 bp, synthetic construct
  source 1..16: mol_type = other DNA
gttctggttgcactgg

SEQ ID NO: 1794 - DNA, 16 bp, synthetic construct
  source 1..16: mol_type = other DNA
tgttctggttgcactg

SEQ ID NO: 1795 - DNA, 16 bp, synthetic construct
  source 1..16: mol_type = other DNA
ttgttctggttgcact

SEQ ID NO: 1796 - DNA, 16 bp, synthetic construct
  source 1..16: mol_type = other DNA
gcggaccccgcggaga

SEQ ID NO: 1797 - DNA, 16 bp, synthetic construct
  source 1..16: mol_type = other DNA
acccagggaagcggac

SEQ ID NO: 1798 - DNA, 16 bp, synthetic construct
  source 1..16: mol_type = other DNA
atccatgcttccagcc

SEQ ID NO: 1799 - DNA, 16 bp, synthetic construct
  source 1..16: mol_type = other DNA
gatccatgcttccagc

SEQ ID NO: 1800 - DNA, 16 bp, synthetic construct
  source 1..16: mol_type = other DNA
aaagaccaagatccat

SEQ ID NO: 1801 - DNA, 16 bp, synthetic construct
  source 1..16: mol_type = other DNA
ggccttagaaagacca

SEQ ID NO: 1802 - DNA, 16 bp, synthetic construct
  source 1..16: mol_type = other DNA
agctttgatgctaggg

SEQ ID NO: 1803 - DNA, 16 bp, synthetic construct
  source 1..16: mol_type = other DNA
gacagatgatctccta

SEQ ID NO: 1804 - DNA, 16 bp, synthetic construct
  source 1..16: mol_type = other DNA
cctcactactactgcc

SEQ ID NO: 1805 - DNA, 16 bp, synthetic construct
  source 1..16: mol_type = other DNA
cctcaacccatgccac

SEQ ID NO: 1806 - DNA, 16 bp, synthetic construct
  source 1..16: mol_type = other DNA
acttaggtttagtccc

SEQ ID NO: 1807 - DNA, 16 bp, synthetic construct
  source 1..16: mol_type = other DNA
agctagagtgggaact

SEQ ID NO: 1808 - DNA, 16 bp, synthetic construct
  source 1..16: mol_type = other DNA
tgatacatccagagtc

SEQ ID NO: 1809 - DNA, 16 bp, synthetic construct
  source 1..16: mol_type = other DNA
atgatgtgatacatcc

SEQ ID NO: 1810 - DNA, 16 bp, synthetic construct
  source 1..16: mol_type = other DNA
acacacttggtacagc

SEQ ID NO: 1811 - DNA, 16 bp, synthetic construct
  source 1..16: mol_type = other DNA
ggtctataaagtgccc

SEQ ID NO: 1812 - DNA, 16 bp, synthetic construct
  source 1..16: mol_type = other DNA
agagtaatgaaaccca

SEQ ID NO: 1813 - DNA, 16 bp, synthetic construct
  source 1..16: mol_type = other DNA
cttcacctgtttgagt

SEQ ID NO: 1814 - DNA, 16 bp, synthetic construct
  source 1..16: mol_type = other DNA
tccttagccagggccg

SEQ ID NO: 1815 - DNA, 16 bp, synthetic construct
  source 1..16: mol_type = other DNA
aatgaatacccgaggg

SEQ ID NO: 1816 - DNA, 16 bp, synthetic construct
  source 1..16: mol_type = other DNA
ggacattataacaggg

SEQ ID NO: 1817 - DNA, 16 bp, synthetic construct
  source 1..16: mol_type = other DNA
ctgctatgagctgctt

SEQ ID NO: 1818 - DNA, 16 bp, synthetic construct
  source 1..16: mol_type = other DNA
ctgtagagtggagcca

SEQ ID NO: 1819 - DNA, 16 bp, synthetic construct
  source 1..16: mol_type = other DNA
agggaatgccccctgt

SEQ ID NO: 1820 - DNA, 16 bp, synthetic construct
  source 1..16: mol_type = other DNA
ggcatagggaaagcac

SEQ ID NO: 1821 - DNA, 16 bp, synthetic construct
  source 1..16: mol_type = other DNA
gaggcatcgggtgagg

SEQ ID NO: 1822 - DNA, 16 bp, synthetic construct
  source 1..16: mol_type = other DNA
ggactttctgttgatg

SEQ ID NO: 1823 - DNA, 16 bp, synthetic construct
  source 1..16: mol_type = other DNA
tggactttctgttgat

SEQ ID NO: 1824 - DNA, 16 bp, synthetic construct
  source 1..16: mol_type = other DNA
ccatggactttctgtt

SEQ ID NO: 1825 - DNA, 16 bp, synthetic construct
  source 1..16: mol_type = other DNA
tccatggactttctgt

SEQ ID NO: 1826 - DNA, 16 bp, synthetic construct
  source 1..16: mol_type = other DNA
gtccatggactttctg

SEQ ID NO: 1827 - DNA, 16 bp, synthetic construct
  source 1..16: mol_type = other DNA
ggactttctgttgagg

SEQ ID NO: 1828 - DNA, 16 bp, synthetic construct
  source 1..16: mol_type = other DNA
cgcctaagtgccaaga

SEQ ID NO: 1829 - DNA, 16 bp, synthetic construct
  source 1..16: mol_type = other DNA
agcaatgaggctctga

SEQ ID NO: 1830 - DNA, 16 bp, synthetic construct
  source 1..16: mol_type = other DNA
atagttacatgtggtg

SEQ ID NO: 1831 - DNA, 16 bp, synthetic construct
  source 1..16: mol_type = other DNA
aatagttacatgtggt

SEQ ID NO: 1832 - DNA, 16 bp, synthetic construct
  source 1..16: mol_type = other DNA
gaatagttacatgtgg

SEQ ID NO: 1833 - DNA, 16 bp, synthetic construct
  source 1..16: mol_type = other DNA
tggaatagttacatgt

SEQ ID NO: 1834 - DNA, 16 bp, synthetic construct
  source 1..16: mol_type = other DNA
ctggaatagttacatg

SEQ ID NO: 1835 - DNA, 16 bp, synthetic construct
  source 1..16: mol_type = other DNA
actggaatagttacat

SEQ ID NO: 1836 - DNA, 16 bp, synthetic construct
  source 1..16: mol_type = other DNA
taactggaatagttac

SEQ ID NO: 1837 - DNA, 16 bp, synthetic construct
  source 1..16: mol_type = other DNA
gactaactggaatagt

SEQ ID NO: 1838 - DNA, 16 bp, synthetic construct
  source 1..16: mol_type = other DNA
ggactaactggaatag

SEQ ID NO: 1839 - DNA, 16 bp, synthetic construct
  source 1..16: mol_type = other DNA
ggaggatacagtttgg

SEQ ID NO: 1840 - DNA, 16 bp, synthetic construct
  source 1..16: mol_type = other DNA
acactgaacgatttta

SEQ ID NO: 1841 - DNA, 16 bp, synthetic construct
  source 1..16: mol_type = other DNA
ctggaggccgtgagag

SEQ ID NO: 1842 - DNA, 16 bp, synthetic construct
  source 1..16: mol_type = other DNA
accaacttgatgctgg

SEQ ID NO: 1843 - DNA, 16 bp, synthetic construct
  source 1..16: mol_type = other DNA
ggtgagaaagccatgc

SEQ ID NO: 1844 - DNA, 16 bp, synthetic construct
  source 1..16: mol_type = other DNA
gaaaagggtgtagtta

SEQ ID NO: 1845 - DNA, 16 bp, synthetic construct
  source 1..16: mol_type = other DNA
aaacaggtagtggtaa

SEQ ID NO: 1846 - DNA, 16 bp, synthetic construct
  source 1..16: mol_type = other DNA
gtgaaatgtccaccac

SEQ ID NO: 1847 - DNA, 16 bp, synthetic construct
  source 1..16: mol_type = other DNA
gcaaaaatgtgggccg

SEQ ID NO: 1848 - DNA, 16 bp, synthetic construct
  source 1..16: mol_type = other DNA
tccatgtacaggatcc

SEQ ID NO: 1849 - DNA, 16 bp, synthetic construct
  source 1..16: mol_type = other DNA
taagatggctaaagtc

SEQ ID NO: 1850 - DNA, 16 bp, synthetic construct
  source 1..16: mol_type = other DNA
ggattcattaagatgg

SEQ ID NO: 1851 - DNA, 16 bp, synthetic construct
  source 1..16: mol_type = other DNA
gggattcattaagatg

SEQ ID NO: 1852 - DNA, 16 bp, synthetic construct
  source 1..16: mol_type = other DNA
agggattcattaagat

SEQ ID NO: 1853 - DNA, 16 bp, synthetic construct
  source 1..16: mol_type = other DNA
cagggattcattaaga

SEQ ID NO: 1854 - DNA, 16 bp, synthetic construct
  source 1..16: mol_type = other DNA
acagggattcattaag

SEQ ID NO: 1855 - DNA, 16 bp, synthetic construct
  source 1..16: mol_type = other DNA
tacagggattcattaa

SEQ ID NO: 1856 - DNA, 16 bp, synthetic construct
  source 1..16: mol_type = other DNA
ttacagggattcatta

SEQ ID NO: 1857 - DNA, 16 bp, synthetic construct
  source 1..16: mol_type = other DNA
tacgattacagggatt

SEQ ID NO: 1858 - DNA, 16 bp, synthetic construct
  source 1..16: mol_type = other DNA
gctcactagtacgatt

SEQ ID NO: 1859 - DNA, 16 bp, synthetic construct
  source 1..16: mol_type = other DNA
agctcactagtacgat

SEQ ID NO: 1860 - DNA, 16 bp, synthetic construct
  source 1..16: mol_type = other DNA
gccttagtaagagctg

SEQ ID NO: 1861 - DNA, 16 bp, synthetic construct
  source 1..16: mol_type = other DNA
agttacttacttaatc

SEQ ID NO: 1862 - DNA, 16 bp, synthetic construct
  source 1..16: mol_type = other DNA
gaccaaacaagttact

SEQ ID NO: 1863 - DNA, 16 bp, synthetic construct
  source 1..16: mol_type = other DNA
ggaccaaacaagttac

SEQ ID NO: 1864 - DNA, 16 bp, synthetic construct
  source 1..16: mol_type = other DNA
attagatgtgggacca

SEQ ID NO: 1865 - DNA, 16 bp, synthetic construct
  source 1..16: mol_type = other DNA
tatgagaatcagtata

SEQ ID NO: 1866 - DNA, 16 bp, synthetic construct
  source 1..16: mol_type = other DNA
ctatgagaatcagtat

SEQ ID NO: 1867 - DNA, 16 bp, synthetic construct
  source 1..16: mol_type = other DNA
ggagaaacacggatgg

SEQ ID NO: 1868 - DNA, 16 bp, synthetic construct
  source 1..16: mol_type = other DNA
ttccatcagcggtgga

SEQ ID NO: 1869 - DNA, 16 bp, synthetic construct
  source 1..16: mol_type = other DNA
ggcacaagttccatca

SEQ ID NO: 1870 - DNA, 16 bp, synthetic construct
  source 1..16: mol_type = other DNA
aggcacaagttccatc

SEQ ID NO: 1871 - DNA, 16 bp, synthetic construct
  source 1..16: mol_type = other DNA
caggcacaagttccat

SEQ ID NO: 1872 - DNA, 16 bp, synthetic construct
  source 1..16: mol_type = other DNA
gcaggcacaagttcca

SEQ ID NO: 1873 - DNA, 16 bp, synthetic construct
  source 1..16: mol_type = other DNA
agcaggcacaagttcc

SEQ ID NO: 1874 - DNA, 16 bp, synthetic construct
  source 1..16: mol_type = other DNA
aagcaggcacaagttc

SEQ ID NO: 1875 - DNA, 16 bp, synthetic construct
  source 1..16: mol_type = other DNA
gtgctgcccccatgga

SEQ ID NO: 1876 - DNA, 16 bp, synthetic construct
  source 1..16: mol_type = other DNA
gggacaagtataatgg

SEQ ID NO: 1877 - DNA, 16 bp, synthetic construct
  source 1..16: mol_type = other DNA
aagcaggtcattgttt

SEQ ID NO: 1878 - DNA, 16 bp, synthetic construct
  source 1..16: mol_type = other DNA
tggttgtacggtctca

SEQ ID NO: 1879 - DNA, 16 bp, synthetic construct
  source 1..16: mol_type = other DNA
gcaaagacggaaaggg

SEQ ID NO: 1880 - DNA, 16 bp, synthetic construct
  source 1..16: mol_type = other DNA
gcgacgggagccaggc

SEQ ID NO: 1881 - DNA, 16 bp, synthetic construct
  source 1..16: mol_type = other DNA
cttggagctagcgacg

SEQ ID NO: 1882 - DNA, 16 bp, synthetic construct
  source 1..16: mol_type = other DNA
tgctaccctgccatct

SEQ ID NO: 1883 - DNA, 16 bp, synthetic construct
  source 1..16: mol_type = other DNA
tgccacacggcacaga

SEQ ID NO: 1884 - DNA, 16 bp, synthetic construct
  source 1..16: mol_type = other DNA
gcaaatcacaggttcc

SEQ ID NO: 1885 - DNA, 16 bp, synthetic construct
  source 1..16: mol_type = other DNA
catcagtatgtctcag

SEQ ID NO: 1886 - DNA, 16 bp, synthetic construct
  source 1..16: mol_type = other DNA
gaggaagatcagtacc

SEQ ID NO: 1887 - DNA, 16 bp, synthetic construct
  source 1..16: mol_type = other DNA
ccctaactgcccatgc

SEQ ID NO: 1888 - DNA, 16 bp, synthetic construct
  source 1..16: mol_type = other DNA
cggcattgacttccgt

SEQ ID NO: 1889 - DNA, 16 bp, synthetic construct
  source 1..16: mol_type = other DNA
tcacacatctaccttc

SEQ ID NO: 1890 - DNA, 16 bp, synthetic construct
  source 1..16: mol_type = other DNA
tttactcacactccct

SEQ ID NO: 1891 - DNA, 16 bp, synthetic construct
  source 1..16: mol_type = other DNA
cctacaggacttgtgc

SEQ ID NO: 1892 - DNA, 16 bp, synthetic construct
  source 1..16: mol_type = other DNA
agagagagtagggtca

SEQ ID NO: 1893 - DNA, 16 bp, synthetic construct
  source 1..16: mol_type = other DNA
tgagagtaattcctta

SEQ ID NO: 1894 - DNA, 16 bp, synthetic construct
  source 1..16: mol_type = other DNA
caccgttgttgattcc

SEQ ID NO: 1895 - DNA, 16 bp, synthetic construct
  source 1..16: mol_type = other DNA
gctcaaggtaagtaca

SEQ ID NO: 1896 - DNA, 16 bp, synthetic construct
  source 1..16: mol_type = other DNA
gctctaggaggtgagc

SEQ ID NO: 1897 - DNA, 16 bp, synthetic construct
  source 1..16: mol_type = other DNA
tcctactggcctcgcc

SEQ ID NO: 1898 - DNA, 16 bp, synthetic construct
  source 1..16: mol_type = other DNA
ttccaggttgtatctc

SEQ ID NO: 1899 - DNA, 16 bp, synthetic construct
  source 1..16: mol_type = other DNA
acatacaccaagagat

SEQ ID NO: 1900 - DNA, 16 bp, synthetic construct
  source 1..16: mol_type = other DNA
cctatgaacccacata

SEQ ID NO: 1901 - DNA, 16 bp, synthetic construct
  source 1..16: mol_type = other DNA
ggctgccacggaatca

SEQ ID NO: 1902 - DNA, 16 bp, synthetic construct
  source 1..16: mol_type = other DNA
atacacaacccctcca

SEQ ID NO: 1903 - DNA, 16 bp, synthetic construct
  source 1..16: mol_type = other DNA
gtgaatacacacctgg

SEQ ID NO: 1904 - DNA, 16 bp, synthetic construct
  source 1..16: mol_type = other DNA
cctcagtgagtactgg

SEQ ID NO: 1905 - DNA, 16 bp, synthetic construct
  source 1..16: mol_type = other DNA
gcctgcaggttgtttt

SEQ ID NO: 1906 - DNA, 16 bp, synthetic construct
  source 1..16: mol_type = other DNA
tgaggaaccgctggag

SEQ ID NO: 1907 - DNA, 16 bp, synthetic construct
  source 1..16: mol_type = other DNA
tccaaactttactgat

SEQ ID NO: 1908 - DNA, 16 bp, synthetic construct
  source 1..16: mol_type = other DNA
taaggaggagattcca

SEQ ID NO: 1909 - DNA, 16 bp, synthetic construct
  source 1..16: mol_type = other DNA
gtcctataccaggata

SEQ ID NO: 1910 - DNA, 16 bp, synthetic construct
  source 1..16: mol_type = other DNA
agagatttgtctagtc

SEQ ID NO: 1911 - DNA, 16 bp, synthetic construct
  source 1..16: mol_type = other DNA
actcaactgtagtcaa

SEQ ID NO: 1912 - DNA, 16 bp, synthetic construct
  source 1..16: mol_type = other DNA
tggcacacgacttccc

SEQ ID NO: 1913 - DNA, 16 bp, synthetic construct
  source 1..16: mol_type = other DNA
tgcaaacccttgcagc

SEQ ID NO: 1914 - DNA, 16 bp, synthetic construct
  source 1..16: mol_type = other DNA
cactaccatgtcccct

SEQ ID NO: 1915 - DNA, 16 bp, synthetic construct
  source 1..16: mol_type = other DNA
tgcggagccagcccag

SEQ ID NO: 1916 - DNA, 16 bp, synthetic construct
  source 1..16: mol_type = other DNA
cacgactggaaagtcc

SEQ ID NO: 1917 - DNA, 16 bp, synthetic construct
  source 1..16: mol_type = other DNA
taatggaactgtagat

SEQ ID NO: 1918 - DNA, 16 bp, synthetic construct
  source 1..16: mol_type = other DNA
tatatgatgattgcac

SEQ ID NO: 1919 - DNA, 16 bp, synthetic construct
  source 1..16: mol_type = other DNA
tgcctggcttgagtga

SEQ ID NO: 1920 - DNA, 16 bp, synthetic construct
  source 1..16: mol_type = other DNA
gagtacaaggtttatt

SEQ ID NO: 1921 - DNA, 16 bp, synthetic construct
  source 1..16: mol_type = other DNA
tgagtacaaggtttat

SEQ ID NO: 1922 - DNA, 16 bp, synthetic construct
  source 1..16: mol_type = other DNA
atgagtacaaggttta

SEQ ID NO: 1923 - DNA, 16 bp, synthetic construct
  source 1..16: mol_type = other DNA
gacttgctaatgagta

SEQ ID NO: 1924 - DNA, 16 bp, synthetic construct
  source 1..16: mol_type = other DNA
ggacttgctaatgagt

SEQ ID NO: 1925 - DNA, 16 bp, synthetic construct
  source 1..16: mol_type = other DNA
ttgggacttgctaatg

SEQ ID NO: 1926 - DNA, 16 bp, synthetic construct
  source 1..16: mol_type = other DNA
gcttgggacttgctaa

SEQ ID NO: 1927 - DNA, 16 bp, synthetic construct
  source 1..16: mol_type = other DNA
ttgctaccatacggat

SEQ ID NO: 1928 - DNA, 16 bp, synthetic construct
  source 1..16: mol_type = other DNA
attgctaccatacgga

SEQ ID NO: 1929 - DNA, 16 bp, synthetic construct
  source 1..16: mol_type = other DNA
tattgctaccatacgg

SEQ ID NO: 1930 - DNA, 16 bp, synthetic construct
  source 1..16: mol_type = other DNA
ctattgctaccatacg

SEQ ID NO: 1931 - DNA, 16 bp, synthetic construct
  source 1..16: mol_type = other DNA
gctattgctaccatac

SEQ ID NO: 1932 - DNA, 16 bp, synthetic construct
  source 1..16: mol_type = other DNA
ctgctattgctaccat

SEQ ID NO: 1933 - DNA, 16 bp, synthetic construct
  source 1..16: mol_type = other DNA
aggcactgctattgct

SEQ ID NO: 1934 - DNA, 16 bp, synthetic construct
  source 1..16: mol_type = other DNA
ccatacaagggagtgt

SEQ ID NO: 1935 - DNA, 16 bp, synthetic construct
  source 1..16: mol_type = other DNA
tgctgctagggatgta

SEQ ID NO: 1936 - DNA, 16 bp, synthetic construct
  source 1..16: mol_type = other DNA
acccattaagatgtgt

SEQ ID NO: 1937 - DNA, 16 bp, synthetic construct
  source 1..16: mol_type = other DNA
ccacacccaagaggtc

SEQ ID NO: 1938 - DNA, 16 bp, synthetic construct
  source 1..16: mol_type = other DNA
tcctagggcacctcag

SEQ ID NO: 1939 - DNA, 16 bp, synthetic construct
  source 1..16: mol_type = other DNA
tagcagtaccctgtgg

SEQ ID NO: 1940 - DNA, 16 bp, synthetic construct
  source 1..16: mol_type = other DNA
ggacactaacctgcat

SEQ ID NO: 1941 - DNA, 16 bp, synthetic construct
  source 1..16: mol_type = other DNA
acccaacctgtacccg

SEQ ID NO: 1942 - DNA, 16 bp, synthetic construct
  source 1..16: mol_type = other DNA
ggctcggtaacctgta

SEQ ID NO: 1943 - DNA, 16 bp, synthetic construct
  source 1..16: mol_type = other DNA
tcccaaatgcttggct

SEQ ID NO: 1944 - DNA, 16 bp, synthetic construct
  source 1..16: mol_type = other DNA
ggccacagcattacat

SEQ ID NO: 1945 - DNA, 16 bp, synthetic construct
  source 1..16: mol_type = other DNA
ggcttacagggatagg

SEQ ID NO: 1946 - DNA, 16 bp, synthetic construct
  source 1..16: mol_type = other DNA
cccatatgcttcaggc

SEQ ID NO: 1947 - DNA, 16 bp, synthetic construct
  source 1..16: mol_type = other DNA
ccgacagccgccctgc

SEQ ID NO: 1948 - DNA, 16 bp, synthetic construct
  source 1..16: mol_type = other DNA
ggccgagctccttctt

SEQ ID NO: 1949 - DNA, 16 bp, synthetic construct
  source 1..16: mol_type = other DNA
accttatgccccggcc

SEQ ID NO: 1950 - DNA, 16 bp, synthetic construct
  source 1..16: mol_type = other DNA
ccccagagaccttatg

SEQ ID NO: 1951 - DNA, 16 bp, synthetic construct
  source 1..16: mol_type = other DNA
actgataactggccca

SEQ ID NO: 1952 - DNA, 16 bp, synthetic construct
  source 1..16: mol_type = other DNA
caccaagctgtctccc

SEQ ID NO: 1953 - DNA, 16 bp, synthetic construct
  source 1..16: mol_type = other DNA
gacgatgggacagagg

SEQ ID NO: 1954 - DNA, 16 bp, synthetic construct
  source 1..16: mol_type = other DNA
gaggagaggtacattg

SEQ ID NO: 1955 - DNA, 20 bp, synthetic construct
  source 1..20: mol_type = other DNA
gctgattagagagaggtccc

SEQ ID NO: 1956 - DNA, 20 bp, synthetic construct
  source 1..20: mol_type = other DNA
tcccatttcaggagacctgg

SEQ ID NO: 1957 - DNA, 37515 bp, Homo sapiens
  source 1..37515: mol_type = genomic DNA
tatactccttacccagcttcaactcactgtcagtttcatttattctgtataccccctcccccaccaacgcacacactcttcaaatccctcattattattttgaagtaaatcccagacatcatatcatttcatttgaaaatatttcaggattttaccctaaaagacagggactctttctctattctatttttctttttttccccaccctgtcttatgctgctgagaccctttcttttaatagaggtgtaacatataatacaatgaaaccgtaaggtacactgatcttacagatacagctcagagagtcttcacttttgtgtattcttgcatatcccccaactggtccagaacacctcttctcttctcttcttttctcttttcctttccatacagagtctcgctttgtcgcccaggctggagtgcagtggtgcaatctcggctcactacaacctctgcctcccaggttcaaacaattctctgcctcaacctcccgagtagctgggattacgggcgcctgccaccatgcctggctgatttttgtatttttagtagagatggggtttcgccatgttgaccaggctggtcttgaactcctgatgttgtgatccacccgccttggcctcccaaagtgctgggattacaggcgtgagccacggcacccggccccagaatgttccttgcactacaaatgtttgctacatgcccttcccagtcaaagcttcctgcttcacaggtaaccactatgtccagaccccttttaaccccagctggctggactgtatgtttctttctgctgccagccgtaagctggcgcttcagccctcatggactctctacaccctaaggaacgagccctgagatctgggttttgatcctggccccatcactttatctctgtgtgcctctttattgtgtcagtcagctactggtttgcttgcaggtctgtgggatggaggtgggatgggaggagtgaagcagccaggctatttctctcctctctgctttctggcttcacctgcagttggttgtcttccttccttccccacttccataatcccatctcctaccagtagtccacactatttagttcctgccaaatggctctggaggcttcttggtctttgatgctacatcaccctgccatctttccaggcctagagatggtagctgcttcccgctctgctgttttctgagctgcctcccattgtcttctcagctcctccatcacccatgtaccagttagttctctgtgttaaacttcttctgtttgaaagacttagagtgtttcttgtttcccagctggatcacgaaagacaaatcttaccaataaatggctactataatgcccagccatccccaggaggataaagggagactccaggggtgagaaatccacaggttcaccgcgggcagggcattgtctttactcctgtccttttgtgtttttcaccagagcctcctgagactgatttccactgggcaacaccagacccagaccgagcaccccaggacgcctagaaggtgtgtgagggtgggactcttctcccaggccttcttccgaaggagctgctgagagagccttctttccacaggcccattaggcatccagaaagggggctgatggaaatggattcttcttcttcttcttcttcttttttttttttttttgagacagagtctcagtctgtcgcccaggctggagtgcaatggtgcaatctcagctcactgcaacctccgcctcccaggttcaagtgattttcctggcctcagcctcccaagttgagtagctgggactacaggcatgcgccaacaggcccggctaatttttgtatttttagtagagatggtgttttgccatgttggccacaggctggttttgaattcctggtctcaagtcatttcgcccaccttagcctcccaaagtactgggattacaggcacgagccactgtacccggccaggaatggattcttctaaatactttttctttctctcttcttctccactctgctcttagctgactagtgctcttggaaatggtctggcaaacacccagaagtgcataacagatgagggttgtccttttccagagtatttgcattttcagtggtgacaatgccttaacccagtcttttcaacgggggtgactttgccccccagaagtcatttggcaatatttggagatgttttggtcacaatgactcaggaggtgctactagcatctaatagatggaagccagggatgctgctgaacatcctgcacaggattgtagataggacagaatcatcctgtcccaccacaaagaatgatacagccgaaaatgtcaatagtgccaaggttgataaaccctgtcttcaatcaaagtgataaacttctagtagtgaacttctttttttgtttttttttttgttttttttttttttgagacagagtcttgctttgtctcccaggctggagtgcagtggcacgatcttggctcactccaagctccacctccccggttttatgccattctcctgcctcagcctcccgagtagctgggactacaggcgtgcaccacttatgcccagctaattttttttgtaattttagtagagacggggtttcaccatgttagccaggatggcctcgatcccctgacctcatgatccacccgcctcggcctcccaaagtgctgggattacaggcgtgagccaccatgcccggccaacttctagtagtgaacttctaagtaaactgccaggggactagatgaagagtggcatttttctggtccatcattttaaatgaaagagaaatctgtaccacataagggcagctgaaaggactgttgtcttccacagtgggcagcccccagtgtgaagtggctaattagctccaagtagtaagaataaagagttgcatttaactaagtaactgattcttatcctggaaaggatagaagtgaacagggaaaagtgaagaaaatttagataaattaatagaccacaaataaatgggttgtcagaggaagttaggatgtttgaagttttgcagatgctttttcgtagcatatcccgctctgtcaaagataaactaggaaagacgccagttctgctgtcttctgcagactgggtcagcaaacagtgaccgctagacactgaggtcaccaagatgaatacgcctggtctctgtccttgtgttgcgggaagtcagggaccccaaacggatgtatacgtacaaacacacatacatcaggataatagtaaataataataataaataatagtaaacagtggtaagtgcagagataggctctccctaggagggtggagtgattacttccgtcatctcctgtccgcggagaacaagaggcaggaagaccctttgcactcataaccctcatcccatggcagcccctctggtttcacttctctccctgcagccgtgcatattttatggccacaccacagggttagaggatagctggtgttgggaggggaaggcagccctgggttggcgggaagggctggggctctgggggagtctgggggtagtcctgggaaggcagggggtccttccaagacagagtctacaaagctcttgacttcttatagaacaaaactgtacttctctcaaagtcagagaaggagaactgggcttggaaaggagtggcctggttttcagtctgaccccacccctaactcctgggtgactgtggccaagtcactttgcttctgtgggcctcagtcccctcatgcatgaagcagggggctagatgcaaggtcagctggaaaaagtctttgtccatctgggttgccttacccaccccttcttgccctttcattttctcaggtaagatcaccggggcccatagaggtcaagtgcctttctcaaagtcacatagtttaaaagcaaaaataggggctgagtatggtggctcacacttgtaatcccagcactttgggaggctgaggcaggaggactgcttgagcctaggagttggaggctgcagtgagccatgatcatgctgctgtactccagcctagaggatagtgcatgatcctgtctctaagataaataagaaaataaaagcaaaaatggaagttgtagaaacatacctatagcatggtctctgtcataaaaaagaactatatattttgttttttaaaaatacatgtaagtttataaaggcacacaaaaagatatagacagatatacaaattatggtggctcccctttggggagggaaaggaaggggactaagggaagctctatatacttctgtattgctgaaaaattgtactgtgacaaaaacatatttgtgtattatttgtacactttaaaagatcatctttaaaatggacttctgaccaaagtccaggtctcagatttctattttcctcacaacaccaagcctgttctagcccgctccaggtctagaatgctgcagcactaggctcgcattgccactcccatacccggcaggacgtggcagggtcaccaccctttggctcagcccagaccaggcattgcaattcttctcacagagcccttgatatgaaaactatttgccatgctgccttaagctagtggttggatttcaggcatgagctggcaaatagaaaaggcagggaggtgcttttcagaacctttgagatcaaacagccagggtgctgagcaccttattgcagggaggaccatgcccaatgtaaggacctggctcaagggagactggagtttctaggggtctctgggatatgtggggcagtggggacagtgcagagaccttttcacagagccaaggagataacccagcacccagagagcagacgaatccacgggctctgtgtgggagtgagggaggccttcccggctttcacatccaggtgcacctgagccccgatcccccatgagtctgtctcaggaagtaaatggcaaaagcgctaagtagatagccccagaggaggaggagaattctgaattctgtttatagctctgctcctattttgttttctaacctcagaaaactgatttatccttgggaagggtcagtttcttcattaggacaatgaagaaaaatccagctgtcccttccaaggggaggtatcatgagcagtatcaaggtaagcaagggaacctggtttggaatcctggttgacaccggctttcactttaagaagtcgcaagagactgccgcaagagaggaagccacagaccaggttggaccctgagcctggagtactgccttttctcttctttgcctgctaaactccttgcttgtcaagattcagcagagatgacaccttctctgggaaggcttcctgagtctcctgcagtgagcccctaggctcccctagcccttggctcttatgtcttatctctgagaaatctgagatctgcacttttgttagaagtccgttttaaagacaatcttttaaagtgtacaaatagaaaccttatcttattgtattgcaggcctatctcctcccccggtgtgtatcaatgctcaggctgggcctttgtctgctggcttgtggagggaggcaggacaagccagtgaccacattcctgcactctgggctgcctcctgtggggcccgtgaggaagcggcagccttccctgccgcgtgcagggcctgggttgtgtgggtggctctcccgagtctcctccagccctttttgggtctgattctctgaccctcctctctctccttgctcaccacttggcactccactccttatccttttgctgcattaagtttggaaagagattttggagaaaatatagcccatcaacgaatttctcctcctcccagggcctgtctaggcgtgtgccatgcccaccctcttcctttccagcgctggccacatcctccctgcaccttcagtgcctgctttccctgcctcttcctgggctccgggtctgtgtccacagtgtcctgcgtggccctcgcgctgcctctggttgcccacattcctgcaactctgtgaccacagcaggggcgattacacattcctggcctggcagccaacagtgtaaaaaagaacagaatgtcctagggccccgcctagcccccagcttcacctgggcccctcccgggtctggacaaggttggagggggtggcgaggaatcagcaggaaagaggagggaccaggaggaggcagacgcatcccacctgagtgcgctgctcccacttagtgagcggggaggagacctgcagagacctcttctctcttctctgcagggcctgagggtgaggctgacctgtgggtgcccttggagggctgcccacttgctgagcctctagctcctggaagcacacttgggactccccccttgctctccttcctggagacagactccctttggtgctggctccttctatttgcccccaccactgccccccacctgcctctactcactcagtgcccctcctccatccctatctctctgtccttcgctgtccctctctattgtctccctctttctgccctcctgtcctcccggttccccacccaggccctctcagcctggctggccccttctccttgtgttgccctcctagctgtgggctcaggatccttctacttgttcagatctttgcccctcacctgccatcctgtcccccagcctccttgcctgtctgcgtctaaagcccctgcccagagtccgccttctcaggtccagtactcccagttcacctgccctcgggagccctccttccttcggaaaactcccggctctgactcctcctcagcccctccccccgccctgctcacctttaattgagatgctaatgagattcctgtcgcttccatccctggccggccagcgggcgggctccccagccaggccgctgcacctgtcaggtgagggggaggagaggtttggctgccagattcaactggaaaggaaccagtcccagtccagccgcaacctgggagtgggaagctggaggcagcccagacctcctggagccctgcagtcctggggcagagacagaatcaggacacagctcgaggtcagggccagaggctggagctgagggcctagagtgagagggggcaaggcaagggggggagaggaagagaggcaggattagagagaggaggcaggccagaaagaggagagcaggagagacccaaagagaaacagaaggcagatagagagggagtgagaggcaggagctgagacacagatcctggaggaagaagaccaaaggaagggggcagagacagaaagggaggtgctaggacaaaactcgaaaggtggccctatcagggaagcagaggagaggccgttctagggaagcccagctccggcacttttggccccaactcccgcaggtctgctggctccaggaaaggtggaggagggagggaggagtgggagaatgtgggcgcagggtgggacatgggcatggccaggggcagcctcactcgggttccaggggtgatgggagagggcactcagggcccagagctcagccttgaccctgacccttgctctccccaatccactccggggctcatgaaggggaacaagctggaggagcaggaccctagacctctgcagcccataccaggtctcatggaggggaacaagctggaggagcaggactctagccctccacagtccactccagggctcatgaaggggaacaagcgtgaggagcaggggctgggccccgaacctgcggcgccccagcagcccacggcggaggaggaggccctgatcgagttccaccgctcctaccgagagctcttcgagttcttctgcaacaacaccaccatccacggcgccatccgcctggtgtgctcccagcacaaccgcatgaagacggccttctgggcagtgctgtggctctgcacctttggcatgatgtactggcaattcggcctgcttttcggagagtacttcagctaccccgtcagcctcaacatcaacctcaactcggacaagctcgtcttccccgcagtgaccatctgcaccctcaatccctacaggtcggttagtccctctgccccttccctggtgcctgcgcctggaagggtggtccagggtgctgaggtgctcactgggcaggcagagcctcagacctgagggtgggaactgacacccctgtcccaggtagagctcactgctggcaaaatgaggagcctccagcttactggactggcgtccctgcccagtggagccatcctagcaccccaggctcacccagagtgtggttgttggagcagcattgccctcccctgccctctcttctccttccctcccattcccttctccctcctgcaagtgggagggagtgcttgcaaaagggcaggggtgtgctcagctgcatcccttttctggagcaagatgccagcaaagtataagacctcgtccacctcagcaggagagtctgatggaggggtgaggctaggtgaggggaggcgagaccgtgcaggtgctgtggaggtggtgctgtcagtctttgtttagaaggggaatttattatggagaaagcaaagagggggatcgtggaggttagggctgcaagtgagcccaaaggctgggggcaggggccttacagaacaaggagaatgggtcaggctagagagcagctccttgtgaagctcttcccccaaaagacccaggctaaaatgctgcactgttgacctgcccaggtgcctgacctttacgtgcttgggtgtgtcctgaacttttgggtttcatcggtgctctttgccaatgttgggtctggaaaccggagcaggtggtaagcgtggagaagagaggagggcagggctgagtgcttttgtataccttttatttgtattcactcagccatgccacaccttgggaacacctgcttcaagccagacacagggctaggcacctggcaaaatggattcatgaataattcataagccctttattgaaggccaggtagtttgctgtgttgtggagacagataaaataagatagcagagacaggcatataagccagtaactgtggcacactgggataagtatgataaaaatggtgagttagtgtaccttcaaggagtgcaaaatctttatgggtgtgggtgtgagtgtgtgtgtgcacatattggtatgtgtgcgattttggatgctggggattggtcatgctgtgggtggaggccccttcgtatattccatcatgtccaaaggtgcgttacggactaagaaagggtgggacgtcctgtcctggagagagagagaaaaaaaaaagccaggtcatttcgttgattaacgtctgtataatgtcccaggtagggaccatttccttaggaagctgccgtgtgcacagacgctgcgaaggtgtcttgggtatctcatttcattctcacatcttacaagcccggtgctattgttatccctattttacacttgaggaaactaaggcaaagagaggcaagtcacaacatcacagagagagtgactgagctgtgactcatcctgtttacgcctaatcccaaaactctgcctctttttaatacccaagatgtggggctttgagtgaatgaaacttccagtcagatgtggcttccgcctcatttcagagctctcttgggtccttcctcttagcctcatttttctccccctgctgcctgcagacatcttcacccctttaggccttggtggaggggagggacccagcaggaaggggaaggacagcaggcggggcagtgggcactcaataaatatttgtggttgaaaatatgtcagtgagagatggaaagggagggcaggggtgaatcgggtgaggcctgcacagttcttaggttctgctggatgcggggccctagacagtccaggaaaaagccggggaaaggaagccataagccctgcctctggggcctgcaggctgggaggcagccatctgcccagaaagaatccctccttcttgaagggctgctgtgggagtcgggagggagagtacacctaggagaggagaggagtcggggaagggctccccagcacagcgggaggagatgcaacacccaccaagcactacacacttgaccttgtagtcacattatgtgctacaccctaaagctgggtgctttatagacactctctcatttaatactgacaagtccagggaggtgggcagtattattcccatttttttagatgaggaaattaaggcttggcaagaggaaataatttgagcaagggaacatacattatttatttattaaattaaaaaataaccgctgggcatggtgcctcacgcctgtaatcccagcactttgggaggccaaggcaggcattgagggatctgggatggagctcaaacaaggttgtttaaaagagcccctcacttgaggccaggagttcgagaccagcctggccatcatggtgaaacccccgtctctactaaaaatacaaaaatcagccaggtgtggtggcgcacgcctgtagtcccagctacttgggaggctgaggcaggagaatcacctcaggaggccgaggctgcagtgagccgagatcacgccactgcattccagcctgagccacagagtgagacacagtctcaaaggaaaaaaaaacaataataatgtttgtatatatttatgggccagactttttacaaatgaatctaaatcaaatgattctgctttaaattatttaattctcacaacacaccttggaagtaggtctcatgatgactcttattttatggatgaggaaactgagtcccagagagttaagtaactgcctcaacttcagacagacaacaagtggtgaaactgggactcaaaaatcatcccccgccccccgccccacccccacccccaccgtccaccctcacccccaccccccgcccccccgccacgctccaatggaaagccagggcatctcaggttagcagctgagtcacaaacctagtgtgtttgatttcaaagctcttttacccattacactttaagtagggatcaggcaaagacctcccagggtcgggggcagctggtgggagcccagcgggcagagcagcagtcattggaggacaatttgtcaggcgtgcaggagggagggatccagggccactcctactcaggagagtggcagggaggtaaacaggttaatgagcccctgtgagtgaatcaccgggagcgcagtgaatgactcctaccgaggagatcggttgatgagctagaggaactggagtgaggcagagctgcccagggctgcctacctgctgagggtcgccaccagcagagggagaggaggaaagtggacatgcaggactctgtgctgctttctaacttcaaggaaaggggacaaagcactgaagacctttcagactaagcaaggaagtgctgagtccgaagggaagggttggccactgcagcccctttctctctggtcaacaaagggcttcttcactgaaaggagagggccagtcatacctacagtcatggaaaacagagcccacagacatatttttcatccagtcccaggaacggtttaggctggacccaagaacttggggttcttgaacaatgaaggaggtcatggtagcttctttcctggaaatggcacagcaggaggccaggagtgggtgaagcaaggggcagtttcccagagagagctcctgtggggaggatgggaaagccctgagctagggaggccgtccctgcctgtggtccccagacgtggcgggcagaccctgcattccctgggcagtctggacaccaggctgtgctcagcagggctggcaggaaaaaaagcctggactgttgagagttgacatccctctaaccctgccatggtggttggatccttctcatcccaggtgggatggggcctaggcggctcccacggctgttaggatgagcatgggctcttctgtgagaggaggccaccggggtaagagggagggaagaggaggagagagcagagtgtcagcctccaagtctcccagggtccttgcaccctgctgctccgtcctggacacggaagaggggctagaggggagagggccagctgcagggaaaggagattttgctgcctgatcccagatgcttcagagctgggaggcagacacagtggaaaaagcaggggccgtggagtgaacaggcctgggttcacatcttggctccagtccttcctggctgagtgaccctggggaatttgcctagttgataggcctcagtttcctcaactgtaaaatggggataataatgcctgcccgatggaattgtgtaagggttgactcaccctccaatgtagggctgcctgccagagcagatgggagtgagggcagtgagcatgacctgaggaggaggtcaaggccagaagggctggactgtctggaagaacccactgtgggcattctttatcccttccctccagccgctggtctcctcaaaacaagatcggatgtcttcaatgtgctttctgtttagtggtcaattctcttagctctaggtgtcaactcaaaggctctgcctcctgctataggaatttctagtatcacggggtcatggagggagagattttttttttttttttttttttgagacagagtcttgcactgttgcccaggctggagtgcagtggtgggatcttggctcactgcaagctccgcctcccgggttcatgccattctcctgcctcagcctccagagtagctgggactacaggcgcccaccaccatgcccggctaatttatcatacttttttagtagagacggggtttcgccgtgttagccaggatggtctcaatctcctgacctcgtgatccaccatcctcggcctcccaaagtgctgggattataggcgtgagccaccgcgcccggccattccgtcttatcttatgccaaaaaagaggagcagtagaccttttgggagagtgaaggtggggccctatggaacccagcctcctctggaggccttgtcacaggtttgtgtgtgtgggatcaagggctgggagcccaggctgtgctcagtgggggggctcatcagtgaggccaggcaggagggaggcgcgtagggtggcaggagggaggtgcgtagggtggcaggagggaggtgcgtagggtggcaggagggaggtgagtagggtggcaggagggaggcgtgtagggtggcagcatggaggaggaagccgggcacagagatggcatgggggctccccaggggagaggagtgtggccagagaagtgacaaccagattgaagttggtgatgagagagagggaggggcaggaggcagaagggacttgagccagcctggggaaggagtggaaagggaggcccagccaggatgtggtggaaataactccaggcaagtgggggatctggattcttcctgtgtgaccttgagaaaggcaaattcgctttcctgggctcctggctcctctgtgtcttcctgatagtcgatggtctcttcactttgtgtcactgagtattttctcacttaaccccccaagagcttcatgcggtaggcagatctagtgttatgcccattttacagataaggaactcagactgagagtcagaaaggctgggtcacttaccccgagttacacagacagaaagtgtgtggctggaacaccaggccctacatctcagagaggttctggcttgggtgctctttctggggcaccatgtggccctcctaaaatagccagaggtagcagggacggaccagagggcagtgtggtggttggagtgctgtctgacccatttgctagctgtgccaactggaataagtcatcatgcctcaggtttttcacctggaaaagggaatgacaattgtgttagctaacagtggctaacggtatactgtgttacactgaagattaaatcatgttaaataagttttagcctaaagttgcctctttacatttttaaagtttgtcctaaaggtttcttcatgcatagtgaactgccacctaactagatatgtaaacacactataacctacctttatagcaatcacagagttttggccaatgaaaggcagcccacttgtcaaaccttgtccaaataaggcaaacgccgggggtgtaaccaatccgggtgtttctgtaccttacttccgttttctgtgggtcactttccttttcctgtccacgaatattatcgaatcatgcagcagcccccagagtcactgtgaatctattctggttgggggcggggggcactcgattcgaggttcattgtttgctcagtgaaactcaagttaaatttaatttgtttaaagtttttcttttaacaattaaataatgtacattctaataccacagtgcctggctcataataagtgctcgataaacgctagctatgcttgccattcttttaattataaataacgagcaagtctcttagaatgccaaacacaccttcaaccagagctacattttctcctgtgagaagttcaggggctgccagagctgatgcctaaggcccagccagctagacttttctggtagagatggaaatagagctgaatggaagaggaagtgaagatctggactagacggtggttaatgtagctgcacgttaggaccacgtgggggctctttcaaacaaccttgttctggctccagcccagacccattaaatctgaatctggcaagtaagaccctgcactggtatttttttctttaagtgaggcataattgatgtacaataaaatgaacaaatcttgagtgcccactcaggtttgacagtcgagatgttgaacactcccattacccggtgccccctttccatcaattcctcttcctctcccactgtcattttctgaatgctatctctatcaactggttttgtctgttcatagaattcgtataaatgggatcatacagtatgtattttcttgtatgtgtgtctgacttattttgcttaatgtttctggaattcttccctgtgttttttgcacgtatcagttcctttttattgctgagtggttttgatgagcctattctggttgaggggctgcctgatttgagcatcgttctttgctcaagtcaactctgttaaatttaattttgcctaacgttcttcttttaacaattaaataatgcacattctaataccatagttcctggctcatagtaagtgctcaataaatgctagctatgattgccattcttttttatttttttaagacagggtcttgctctgttgcccaggctggagtgtagtcacacgatcacggctcactgtagcctcaaactcccaggatcaggcaattcttctgcctcagtcttctgagtagctgggactacaggtgtgcaccaccacatctggctaatttttgtattttttgtagatacaaggtttcgtcgtgttgcccaggctggtctcaaacttctgagctcaagtgatccacccacttggccttccaaaattctggaattacaggtgtgagccaccatgccccgcagattaccattcttttaattagcagtaatgagcaagttttctagaatgccaaacacacaccttcaacacacctttgagttgcttcaggctttttggctattataaataaaatggctatgaacattcatgtacaaatctttttcttttttttttttttgagatggagtttcgctctggttgcccaggctggagtgcaatggcgagatcttggctccctgcaacctccgcctcccgggttcaagcgattctcctgcctcagcctcccgagtagctgggattacaggcatgtgccaccacgcccggctaattttgcatttttagtagagacagggtttctccatgttggtcagtctggtctcgaactcttgacctcaggtgatccacccaccttgccctcccaaagtgccgggattacaggtgtgagccactgcacccagcctcatgtacaaatctttatgttctaatgtgtttcgggtgcggcctaaacaccgtaaattaaacacagctcactgtaaatccctacattccttcttaatatgttcatcaattgatggacatttgggttatttctactttttggctattagaaataatactggtatgaacatttgtgcacatttgtgtgtgtatgttgtgggggcatatgctttcatttctcttaggagtggaatggatgggttatatggtaactctatatctaactttttgaggaacttccagattgttttccaaaatgatcgtatcattttatattctcactagctgtgtacagggtcagaatcttttaaaaatgtaggtctgttcggctgggcgtggtggctcacgactgtaatcccaacacattgggaggccgagacgggcggatcacgaagtcaggagatcgagaccatcctggctaacatggtgaaaccccgtctctactaaaaatacaaaaaattagccgggcgtggtggcacgcacctgtagtcccagctactagggaggctgaggcaggagaatggcgtgaacccggaggcggagcttgtgagccgagatcacggcactgcactccagcctgggcaattgagactccgtctcaaaaaaaaaaatgtaggtctgttcataaagtgcctactacatacggttgttctagggattatttgttagatatttttcttacaagagaattttgcctaccccaaggtcaggaagatatcttccatcttctagagtgtttatggttctgaatttcatgtttacgttatgatccatcttgaattaatttttgcctgtatagcataaggtagagattgagggtcattttttttccaatacagtattcagttgttctagcagaacctgctaacaaattttattttctacactgaattgaattggtgttttggccaaaaatcagttgaccatctatgcatgagtttatttctggactctattctattccattgatctattgtctctccttaccaagaaccgcattgttttgattactgtggctttatagtaaatactaaagtcaggaggaatacattttccaacttggctcttcttttctaaaattttctagctattctagattgtttgcatttccagataagtcttagaagcagtatgtcaatttctttaaaaatacctgctggggccgggtgcagtgagtggctcacgcctgcaatcccagcactttaggaggctgaggctggtgattgcttgggctcaggagttggagtccagcctgggcaacgtggtgaaaccccctctctacaaaaaatataaaaattagcttggtgtggtggcacacttttggtcccagctactagggaggctgaggcgggaggattgcttgagcccaggaggaggctgcagtgagcggcgattgtgtcactgcaccccagcttgggtgacagagcaagatcctgtccaaaaaaaaaaaaaaagctggaattttgatagggattgtgttgaatccatatatatatatatctccacttattctgatctttgatttatttcagcagggatttcaatatatttttcagtcttgcacatcttttgttacatttatttctatgtatttgatgttgtttatgttatttaatattgctgttgtatttctggttttccaattttctgttgccagcatgtagaaatgcaattaatttctttttgagacggaaatgcaattaatttttttttttttttgagacggagtctcgctctgtctcccaggctggagtgtagtggcgcgatctcggctcactgcaagctctgtctcccgggttcacaccattctcctgcctcagcctcccgagtagctgggactacaggcgcccgccaccaagcccggctaattttttgtattttttttttttagtaaagacggggtttcaccgtgttagccagggtggtctcgataccctgaccccgtgatctgcccacctcggcctcccaaaatgctgggattacaggcgtgagccaccacacccggcctaaatgcaattaattttttttgtgtatttgttgtgtaccctgcaaccttgttcagtttgttagttctatatttgttttgttttggtagatgacatccctcaggccctgctactctggactttcatgatggagatggtaataggaattgtattaagaaggaatgtagggatttacagtgagctgtgtttaatttacggtgtttaggccgcacccgaaacacattagaacagtctttggaggagggaggcggggtgggtggggcatcctgtatttttagagttggagattctaaaagttcagttgtgaactcttgatttcggtgccaagcggcactcaagccgaaaggccaccgacactcgcctgcggggatcagggcgggatgacctgggtaccgcggtcacgccaaggccgaggccctcacccttcccctctttgggaaagggcagacaagttccgggttcccttctaggtccgggcgagggggagagcgccccacagacgacaggcgcctcctgcctctctccttcaataaacagtccacagtgtcccggctgggctcgccgtggcctccgccttcccggcggacacacctgtttacccttcaccgccggacggccaggaggcgccacgacgaccccagccccgcccaggcttctccgggatggaccggcctcccggggcacagatgaggaccctgaccccggaggggccagacactcgctccagggcccctggcctgaccctcttcccctcgccccttcaggtacccggaaattaaagaggagctggaggagctggaccgcatcacagagcagacgctctttgacctgtacaaatacagctccttcaccactctcgtggccggctcccgcagccgtcgcgacctgcgggggactctgccgcaccccttgcagcgcctgagggtcccgcccccgcctcacggggcccgtcgagcccgtagcgtggcctccagcttgcgggacaacaacccccaggtggactggaaggactggaagatcggcttccagctggtgaggcccgcagcgccgaggggcccgccccgcccctcgccggcccctggccccgcccacccatgggctccgctcctttcctgacccgcccgcgcagcccagtgacaccacgcggggcctcgtgggctcgcgggcaaaaaaaaaagtaaataaatacaaataataactagataattaaaataacacctcttggtgcccaagcttttggggcctcctccctggggtcctatgtagaagcatttcaggggtaggaagtcaaatttattatggaaaatgaacttttattattattattattattattgttttactgtttctggtccttgattcaggaaggaaaatgcaactttctgaattccagtgcccactagtgggactcagttaggaccctccagcgtgatggagaactgggctaacagcccaagatagagaataaggagacagtaaaaaaaggaaacttagctgggggcggtggctcatgcctgtaatcccagcactttgggaggcctaggcgtgcagatcacctgagcccaggagttttagaccagcctggtcaacatagtgaaaccccatctctacaaaaaaaaaatacaaaaattagcccatgtggtggcacaagcctgtagttccagctacttaggaggctgagatgggagaattgcttgaactcgggagatggagactgctgtgagccttgatcacaccactgtactccagcctgagtgacagagtgagctcgtctgccaaaaaaaaagaaagaaaggagcaagggaaaatgagggaggagccaaggaaaggagacagggaagttcccattagtaagagtgggctggggactggagtcctagtcccagctcttgctgggacaaatctcttgatccctcagtcttcccatcagtgaaatgggagggaaagtcttgctccttccaccctaggcaggggaggtataaatgaaccaaaaccgtgtgtgtgcagctactggtctcctttcctggcctgcaactcccttaatcccatgctcccctggtccatgctcctagggacttctgcttctcttccacttctgtctttccccactcctggcttccgactcctgtccgtcagtcctcagaaccccagatcactcattctttgcccttggccctgccaaggggcttatccccggctgcgtgtcccctctgactctagtctctgtgtccagtgcaaccagaacaaatcggactgcttctaccagacatactcatcaggggtggatgcggtgagggagtggtaccgcttccactacatcaacatcctgtcgaggctgccagagactctgccatccctggaggaggacacgctgggcaacttcatcttcgcctgccgcttcaaccaggtctcctgcaaccaggcgtgagtcagtcctgcctggctccttgctctccgcggggtccgcttccctgggtcagcctcacgccctgcatgggcagggcccaggaaatgcttgttgactaaaaaaatgccagtgccagcaggccagggggaagcactggctttgggcccacaccctgccccagagagcgccctacgaactcctgctgctccctgcactgctggatctgagggaagtggcctcacaggatgccttgggaagactggggctttgagaaaccaaaggctggaagcatggatcttggtcttttttgtttttcttttttttgagatggagttttgctcttgttgctcaggctggagtgcaatggcgcgatctcggctgtctgcaaccttcacctcctggggtcaagcaattctcctgcctcagcctcctgagtagctgggattacagtcatgcgccaccacgcctggctaatttttttatttttagtagagacgttggtcaacgtccatgttggtcaggctggtctccaactcctgacctcaggtgatctgcctgccttggcctcccaaagtgctgggattacaggcgtgagccaccatgcctggccagggtcttggtctttctaaggcccctttctccctagcatcaaagctcaaaagggcctaggagatcatctgtctcatactctgttccctgagctgaggctggcagtagtagtgaggtggagtggcatgggttgagggactaaacctaagttcccactctagctctgtcacttcctggccaggtgactctggatgtatcacatcatccttcagagcctatttcttagattgtaaaatggaagtaaaacaaaaaatgagattcattcagtgttcgttcaacaaatagttttgactatctgggctatgtgccagtcactgttctaggcatttggactacatcaaaggaaaaactatataatccatgctcctttggcacttttactcaagtgacgaagatgatgacgataacactcatctcaagagctgtaccaagtgtgtgagatacaaacgtgagggcactttatagaccacagtaaatgatgggtttcattactcttgtactcaaacaggtgaagtgacttgcccttgggaatgggccggccctggctaaggattcttcccaccccactacccctcgggtattcattctgtgaggacccctgttataatgtccttgcaagcagctcatagcagctgcaggttctctgagggctgggagaggctgaggcgaggggggggtccccttctgtaacctctggccccctcctcccctgccttctcctcctgctcgtttattttccggagccatctccctgcctctgcctggctccactctacagggggcattccctcccctgttgctgaagaatggccacagggcaaggtgtcacttcttacccttcacacacactctgcccagtacacgattttgttctgtttttagtctttgcatttgtttgaggacagaaactaccagctgggaagtaagatggtagcaacacctaagcctgagtccgcccacacctgtcaccaagttcctctaactgtcacctggacacctgtgctttccctatgccctcacccgatgcctccctttgctctgtgtgcctgcctccccatcaacagaaagtccatggacacctgtgctttccctatgccctcacccgatgccctccctttgctctgtgtgcctgcctccccctcaacagaaagtccatggttcatctttatcttggcacttaggcgcttaggtcagctcagagcctcattgctcgcctgggttgttatacccaccactccaccctactgcgttcttttgcctccaaatcctcccttccttctgcaactacaggaacctttgtacttcaaccttacttcacgtcaccacatgtaactattccagttagtcctgtgtgttagtccattttgtgttgctataaaggaatatctcaccgggcacggtggctcatgcctgtaatcccagcactttgggagaccgagatgggcggatcacctgaggtcaggagttagagatcagcctggccaacatggcgaaaccccatctctactggaaatataaaaattagccgggtgtggtggcacacatctgtggccccagctactcaggaggctgaggcaggaggattgcttgaacccaagaggtggaggttgcagtgagccgagatcgcaccactgcactccagcctgggcgacagagcaagactccatctgaaaaaaaaaaaaaaaaaaaaaaaaggaatatctgagtctgggtaatttataaaggaaagaggtttaattggctcagggttctgcagattgtacaagcatggcaccagcatctgctcagcttctggggaggcctcaggaaacttttactcatggtagaaggggaggagagggggcaagagagagagagaccaggcacttttaaacaaccagctatcgggtgaactaattaatagtgtgaggattcactcattactgtgaggagggcaccaagccattcaagagggacccacccctgtgacccaaacacctcccagctaggatcacctccaacatgggggatcacatttcaacatgagacttggaggggacaaacatccaaactgtatcctcctgtttaaaatcgttcagtgtctctcacggcctccagcatcaagttggtactccttagcatggctttctcacccctttcctccccgataactacacccttttcccccaccctataatctttttttaataacacttttattgagatataatttacaaaccataaatgtattcttttaatatgtataatttagtgatttttaatatatttggagttgtgtaaccattaccactacctgtttttagaatattttccttaccccaaaaagaaaccctgtacccattagcagttcttccccattttctcccctcctccaagccctgagagccactcttctgctttctgtctctatggattgcctgtggtggacatttcacataagtggaatcatacaatatgtggtcttttgtgagtggcctctttcatttagcataacgttttcaaagcttatccatgttgtagcatggatcagaacttcatttttatggctgaatactatgatattgtgtagatacaccaccttttttttttttttttttttgagacaggttctcactctgttacccaggctggagtacagtggcacaatcagacctcactgtagctttgatttcctgggctgaaacgatcctcctgattcagcctcccaagtagctgggactacaggctcatgccaccatgcccagctaattttttttaattttagtagagactaggtctcactatggtgcccaggctgatctcgaactcctgagctcaagccatcctcctgcctcggcctcccaaagtgctgggattataggtgtaagccaccacgcccggcccacatttttgcttatccattctcagttgatggacatttggattgtttctactttttggctgttatgattaatgctgctatgaacattcctgtacatgtttttgtggatcctgtacatggatctatgtttttatttctcttgggtgtttacctatgagtggaactgctgggtcatgtggtaactctatatttaacattttgaggagctaccagacttttccaaatggtcacaccatttaacattcccaacagcaatgtatgaaggttctaaattctctacctcctcctcatgctgttgtctgtctttttgactttagccatcttaatgaatccctgtaatcgtactagtgagctaatacagctcttactaaggctagacaccattctaagcataatttcatgctcaacacccctgtgaggttgatatttttattatccccattttacagctgaggaaactgaggtacagagagattaagtaagtaacttgtttggtcccacatctaatacttgttagagccccaggattcaaatacaaggaatttaattctggagtctgtgctctttttttttcttttggagacggagtttcactcttactggccaggctggagtgcaatggcgcaatctcagctcatgacaacctccacctcccaggttcaagtgattctcctgcctcagcttcctgagtagctgggattacaggcatgtgccgccgtgcccggctaattttgtatttttagtagagatggggtttcaccatgttggccaggctggtctcaaactcctgacctcaggtgaccccacccgcctcggcctcccaaagtgctgggattacaggcgtcagccactgcgcctggctgagtctgtgctcttaaccatcacattatactgattctcataggccactatagtaatgtgcttagtgtgtatctctatgtgtttttgcaaaatctgtatttaatttatataaatggtattgtgttatagatctcatttcacctcttactatttttttttttgagacagagtctcgctgtagtgtgcagtggtgcaatctcagctcactgcaacctcccaagttcaagcgattcttctgcctcagcctcccgactagctgagataataggtgcccaccaccacgcctggcgaatttttgtatttttggtagagacggggtttcaccatgttggccaggctggtctcaaacttctgacttcaactgatccacctgtctcagcctcccaaagtgttgggattacaggcgtgagccactgtgccccaccacttttttttttcgaagctctatgttttaaaacccatccgtgtttctccaccgctgatggaacttgtgcctgctttccatgggggcagcacccaccattatacttgtcccctctctgtgtgcgaagggctcaccagccttcaggactggccacctctgtagcctctccttcagtccttccctgcatctagcctgggctctagaagtgctgacttcccagtacatcctagaatgtgcaccagtatgtcacgcctctgtgcctttgttcttcaaggccagtggaatatcccggatcacctagttccaatctcctcattttacagaatcatcctacattttacagaggaggagaataagcttagaaacaatgacctgcttgagaccgtacaaccagaaccccaccctttatctctggccagcctcttctccctcttctctttagtcctcctctgctgctcactggccgaagtcccctttccgtctttgcctggctcccgtcgctagctccaagatggcagggtagcagaacacagatcctctctgtgccgtgtggcacatgtgctgtgctacaacccacacagcctccctgttctggaacctgtgatttgctgtgaaattgcagtcctactgcagctgtgttgcctctgtgattgctttctctctgtccccacacctgtcacagatgagttttggacctaccattctgagacatactgatgcaagaggctcccaggaaacacttggtactgatcttcctcccctcagctccgtgctcaccactggtcacactttctcctttaaccctgctcccctcctccccttcattcattcattcattcattcattcattcattcctcactcaacaactatttattaatcatctcctctatctcctagatgacaggatctatgcaactaacccagagatgacacagagatgaatgagatgtggctcctgtcatcaaggagctcatgattcaatggggaactaacacttagatgcatgggcagttagggacatgcaagaatctttgtaatgcaacaagagagaagttacaaggcagcacggaagtcaatgccggtgaacccagatggcctggtgagaggagcctggactagaaggtagatgtgtgaccttgggccagctgtttgagctctctgagccttagcttcctcctctgtgatatgaggatgagactctcacaggctgttggttggagtgactgagggagtgtgagtaaagctctcagcattgtgccagcacatagtaggtgatcaggaaacaaatggctctgaaaggcacaagtcctgtaggagtttaagagagtggacatttctctctgcctcatctccctattccctgcaccacctacactttcctctctgaccctactctctctttcctgataaggaattactctcacttccaccacccgatgtatggaaactgctatactttcaatgacaagaacaactccaacctctggatgtcttccatgcctggaatcaacaacggtgagaagctccctgcttgctccatggcgccctctgcttcagccactcacctgtacttaccttgagctcacctcctagagctgctgggaggggtcctgcctgctgtctctccccaataggtgccacatagtccgttccaggcatgagaggaatcccgtcccaggtcttcctcctgcctccagattccagctcaggggttgccaggtccctttgcgggtcttcctgaacttgcttctcttgcagctttagagactgggcaaggaagggagagtggatttccatctcctaactcttttctaggattcccgcctctgccaactctgctctctctgcacccctaggtctgtccctgatgctgcgcgcagagcagaatgacttcattcccctgctgtccacagtgactggggcccgggtaatggtgcacgggcaggatgaacctgcctttatggatgatggtggctttaacttgcggcctggcgtggagacctccatcagcatgaggaaggcaaggatgctgactgggaggcctggaaggagcgcctcagattgcagaggggcagcggggaggcatgggaggctggagagggagagcatgtggggtgggccttgagcatgtggaggtcttcaggagcaggaatgaggggcagaggggctggcactgggaagtaaagccctgcagggtggaccctgggggacaagtgctgagaaggcattcaaggcatgcttagggtttctggggatgctctgggcctagtggccttgaaatgagcagtgggtgggcatgggggtggctggaagcatgtattgagagggcgaggccagtaggaggggctggcaggtgtgagatacaacctggaactgagggaaggcagagaacccagaggcacttgctctgtcctctgatctcttggtgtatgtgggttcataggaaaccctggacagacttgggggcgattatggcgactgcaccaagaatggcagtgatgttcctgttgagaacctttacccttcaaagtacacacagcaggtgaggcccaacctgattccgtggcagccactcccagccactgccctggctggccctgcaaagctggaggggttgtgtatgtgagagagagagagggaaactggggggtggtggaaagaggatggaggctctgtgcagagaactgctgagttcaggcctgaaccccctctcctctccaccctcctcccttccaggtgtgtattcactcctgcttccaggagagcatgatcaaggagtgtggctgtgcctacatcttctatccgcggccccagaacgtggagtactgtgactacagaaagcacagttcctggggtgagactccagggagcccccaccctgccccactgaccccagtactcactgaggcactttttcctctcagtcccctgtttgtggggatgacttctggctcccacctgctgggatgaatccttccttgctcttgtttttcagcctttagtctctgcctctgtcagtttccctctccctcagtctctctctctttttttctatttttttgaaatggagtctcgctctgtcacccaggctggagagcagtggcgcgatctcggctcactgcaagctccacctcccgggttcccaccattctcctgcctcagcctcctgaatagctgggactacaggcacccgccaccacgcccagctaattttttggtatttttagtagagacggggtttcaccctgttagccaggatggtctcaatctcctgacctcatgatccacccgcctcggcctccctctctcttctatctctgttcctccctctcagtgttgcagtctctctgttttggcctttgtgtgtttgtcaaggaattgtcccatttaaaaacaacctgcaggccgggcgcggtggctcacgcctgtaatcccagcactttgggaggccacggcgggcggatcacgaggtcaggagatggagaccatcctggctaacacggtgaaaccccgtctctactaaaaatacaaaaaattagccgggcgaggtggcgggcgcctgtagtcccagctacgtgggaggctgaggcaggagaatggtgtggacccgggaggcggagcctgcagtgagctgagatcacgccattgcactccagcctgggtgacagcgagactcggtctcaaaaaaaaataaataaataaaataaataaataaaaataaaaataaaaacaacctgcagcagaaggaaggaagagcacgtgagaaaacctccagcggttcctcaatggctcctaaggtttcagtgcatgctctgcccacagcttccctgctcagtgcccagggcgcttagctgggcaggctctggaggggctgggtggggtacacaacacttccctggggagcaggaagaaaatattagaagatacatgggtctgtctcattccttcacattttccatcttatgtgctttagaatggacatactgtatccattcaatagtagaggtatataatttataaatcaaatacatgtattggacctgtttaagattttttttttaactgaacaagggcacaatcagtaaagtttggagcaccttggaatctcctccttatcctggtataggactagacaaatctctttccttttgactacagttgagttgtttggcagggaagtcgtgtgccaggaagctgagagagaaagaaaatcacaaaaagaaaatatgtaagctgcaagggtttgcattcctggagttcatgctcttccctggcacagctggcctgttccccctgcagttcctcctcccagggctctcccctgggcccagctgtcccacagggtgggcggagggccatcacgggaggggacatggtagtgggcactggagacacagaggccctcaaaggcagcggattgtctcaccccagagttcagcgtccatccctaccttgttcctgtctgtggtgacttttccacttctgtccttccctgggctggctccgcagttctcttctgcctggactttccagtcgtggcctcctggttcctgtctctctgaccttagaggattgtagcacatcagaactgggggaaacccaaaggccatctggcctcatctcctgtctcagatgagcaaattaaggtccagggggaggatgtgacacgtcccagggtatacagaactgggatggaggagatgccacctgtgatttctccctcccctcaaataattatttctactttgtgggtttgcacatctgtgagtgaaaaataacaatattgattgctgagaagttgtgaggatgagagaggaagtaaggctaaaagcacagtctgttgcatttcctagggcttacttccccggagaagagggccagctgcttccccttcttcctaaagatctccagccctggtagggatttgggtcagaaatgaagaaggacttcagactgaggaactaaaagtagcaataatgacaaaataaccttacttagaatttgggaaataggggaggaggtgaatctacagttccattattattattattattttggtaatagctttattgagataatttatatcccatacatttcactcatttaaagcatacagcttcattttagtcaaattttagttttaattttacgttttaagtatagtcccagagttgtgcaatcatcatataatcagttttggaatatttttagtgttcccaaaagaaaccctgtactcactcaagccaggcacagtggttcatgcctgtaatcgcagcactttgagaggccaaggtgggcagatcacttgagcccaggatttcgacaccagcctgggcaacgtggcgaaaccctgtctttacaaaaattagctgggcatggtggtgcacacctgcagacccagccacttgggaggctgagctgggagaatcacctgagcccaggaggtcaaggctgcagtgagccatgatcaggccactgcactccagcctgggcaatggagtgagaccctgtctcagataaataaataaataaaccttgtactcattagcaagtcccaagcttccctcccctcctccaccactgccagcccttgggcaaccacgattctttctttctctctctatggatttgcctattctgaatctttttttttttttttcttctggagacagaatctccctctgtcgcccagactggagtgcagtggcgcgatcttggctcactgctacctctgcctctcaggttcaagcaattctcctgtctcagcttcccgagtacctgggactacatacaggcgcatgctgccaagcccagctaatttttgtattttttagtagagatggggtttcaccatattggtcaggctggtctcaaactcctgacctcaggtgatccgcccacctcagcccccaagtgctgggattacaggcatgagccactgcgcccggctattctgaatctttcatatagatggaatcttagagtgtgtgaccctcgtgtctgccttatttcacttagcataatattttcaaggttcatccgtatggtagcaatagcagtgcctcattcctttatatggctgaataacaacactcccttgtatggatagaccacactttgtttacccatttatcagttagtggacatttgtgttgttgccactttttggttattgtgaataatgctgctgtgagcatttgtgtacaagtttttgtgtggacgcatgttttccattttcttgggtatatacctaggaatggaattgctaggtcatatggtaatctatgtttaaccttttttgaggagctgccaggctgttttccgaagtgacatcaccattgtacatccctagcagcagtataagaggttttcagtttctccacatcctgccagttcttgttattgtctttttaaatttttatttatttatttatttatttatttattatttattttgagaagactctcactctgttgcccaggctggagtgcagtggcacgatcttggcaaactacaacctccacctcctaggttcaagcaattatcctgcctcagcctcccaagtagctgggattacaggtgtgcaccaccacacccgactaatttttgtattttcagtagagactggatttcaccatgttggccaggctggtctcgaattcctgacctcaggtaatccacctgcctcagcctcccaaagtgttggtattacaggcgtgagccaccgcacccagcctattgtctttttttaaataacacacatcttaatgggtgtgaagtggtatcttattgtggcttaattcccttattcttatacaattattgttcccatttttcttttctttttttttttttttgagacggagtctcgctcagtcgcccaggctagagtgtgcaatggcgcgatctcggctcactgcaagctccgcctcccgggttcacgccattctcctgcctcagcctcccgagtagctgggactacaggcgcccgccaccacgcccggctaattttttgtatttttagtagagacggggtttcaccgtgttagccaggatggtctcgatctcttgacctcgtgatccacccgcctcggcctcccaaagtgctgggattacaggcgtgagccaccacgcccggcctgttcccatttttctttatggcgtttatgtttttgtccatagcatatatttccttacactggtgtatcctgttttgtttttcgcctgacttagcttattttctttctttattaatttattttttaggccaggtgcggtcgctcacacctgtaatcccagcactttgggaggccgaggcgggcagatcacgaggtcaggagatcgagaccatcttggctaacacagagaaaccccatctctactaaaaatacgaaaaattagccgggcgtggtggcgggcgcctgtagtcccagctactccggaggctgatgcaggagaatggtatgaacccgggaggcggagcttgcagtgagccaagattgcgccactgcactctagcgtgggcaacagagcgaaactccgtctaaaaaaaaaattaatttattaaaaatttttttttttagagacaaggtctcactctgttgccagagttggagtacaaaggcacactcatagctcacttgcaaccttgaactcctggcctcaaacgaccctcccacctcggcctcccaaagtgctgagccactgtccctggcttagcttaatttcttaaacgcttcttggtactgccactcataaggcatcattataatgctaaataatgctcttgtaaagtgggtacccagggatcttgggagacctcttgggtgtggggtagagaaagctgaggtgccctaggagaacaggcatctctctgtacccacagggtactgctactataagctccaggttgacttctcctcagaccacctgggctgtttcaccaagtgccggaagccatgcaggttagtgtccccttccccgggtacaggttgggtagaatacaggttaccgagccaagcatttgggagagctctgccccaacactgagcacctttctccatccccagcgtgaccagctaccagctctctgctggttactcacgatggccctcggtgacatcccaggtagagtgtggggaagggatgggtgggggatgtgtgtgcccatgtaatgctgtggccttctctgggtattatgtgtatgagtgtgtttgacacaaccctatccctgtaagcctgaagcatatgggagtgaccttgatgacacccccattctttcctaggaatgggtcttccagatgctatcgcgacagaacaattacaccgtcaacaacaagaggtcagtcctgccctggtcccagccacaagaagggaatctttgggagggaaaatagacctaagaagagggatcgatatggttgattagaggaaggtccaggaaattcatcctctaccatttcttcccaccctctgccccacacctaagaaatggagtggccaaagtcaacatcttcttcaaggagctgaactacaaaaccaattctgagtctccctctgtcacggtaggtcgtgcctggatggagcctgtgatgctctgggggtcttacttagcagggcggctgtcggggaaaaccaaaaggttgtctctgtgggccagaaggctctgagtctcaaaggcaggggaccaaagaagagggtcaagggagaggttgggagggttggaagaaggagctcggccggggcataaggtctctgggggtggtgggagggacaggcatgctagatgctggggtgaaggcgcttgacccatgcccccatttcagctgcccctaactgtgggccagttatcagttttctctgggtgacactggccaggagcagagacaaagagcccagggggctgctgagaggctgagaggactcgggggtcttcagggatgaagggagacagcttggtgaggagggaagggggctcctctgccagagtccatccagaaccctctgtcccatcgtcaatgtacctctcctctcacagatggtcaccctcctgtccaacctgggcagccagtggagcctgtggttcggctcctcggtgttgtctgtggtggagatggctgagctcgtctttgacctgctggtcatcatgttcctcatgctgctccgaaggttccgaagccgatactggtctccaggccgagggggcaggggtgctcaggaggtagcctccaccctggcatcctcccctccttcccacttctgcccccaccccatgtctctgtccttgtcccagccaggccctgctccctctccagccttgacagcccctccccctgcctatgccaccctgggcccccgcccatctccagggggctctgcaggggccagttcctccacctgtcctctgggggggccctgagagggaaggagaggtttctcacaccaaggcagatgctcctctggtgggagggtgctggccctggcaagattgaaggatgtgcagggcttcctctcagagccgcccaaactgccgttgatgtgtggaggggaagcaagatgggtaagggctcaggaagttgctccaagaacagtagctgatgaagctgcccagaagtgccttggctccagccctgtaccccttggtactgcctctgaacactctggtttccccacccaactgcggctaagtctctttttcccttggatcagccaagcgaaacttggagctttgacaaggaactttcctaagaaaccgctgataaccaggacaaaacacaaccaagggtacacgcaggcatgcacgggtttcctgcccagcgacggcttaagccagcccccgactggcctggccacactgctctccagtagcacagatgtctgctcctcctcttgaacttgggtgggaaaccccacccaaaagccccctttgttacttaggcaattccccttccctgactcccgagggctagggctagagcagacccgggtaagtaaaggcagacccagggctcctctagcctcatacccgtgccctcacagagccatgccccggcacctctgccctgtgtctttcatacctctacatgtctgcttgagatatttcctcagcctgaaagtttccccaaccatctgccagagaactcctatgcatcccttagaaccctgctcagacaccattacttttgtgaacgcttctgccacatcttgtcttccccaaaattgatcactccgccttctcctgggctcccgtagcacactataacatctgctggagtgttgctgttgcaccatactttcttgtacatttgtgtctcccttcccaactagactgtaagtgccttgcggtcagggactgaatcttgcccgtttatgtatgctccatgtctagcccatcatcctgcttggagcaagtaggcaggagctcaataaatgtttgttgcatgaaggaatgtctggagagctggatggggcatcatgaagagggtagggggtggatacaagtcatcacccaagcttctgggaggtcctggggctgggagagggtacagactcccatgccccttggctgcaccatggaagtgaccattcttcacggggtcttaagagggacaaacgttctggtgaattcctccatgggtgttgctgagcgtctgctatgtgcccatggccatgttagggtggaagggggaagacatgatgccaccccttcaggggacctacctcacagtgtttggggagacttgccctctccactgtctgaacctccttttccttctctgctttagtcaccatcatcactaacctccccatcccccactccacttgctgagtcccacttaccacctggcggcaatgaaccctcatctgcctgcctcccatcagctgtctggtggtggtggaggatgatgaggctcaggccagtttctcctggaaatgcaaagccttatatggtcttattggtacatgattgcagagaggggcacagggaatcctcccagctttagtaaaggagagactgaggtccagggaggggctgaaggatgtgcgagtggaactccagctctccgatccttgtttctcccccactccagcataagacctggaatccagaagtgaccctttctcaccatctttggggattctgtccctgccaccttagtcttattcatcttaattgcagtctccctgttctgaggagccaaaggaggaagagactttcggggaaagaggagaaggagctggtgacaggggtaggaaggtagacagggtcatgacctgaaacggtgtgacgactgctgacttccctttcctggacttgagctgatgaaggggaaatggtgttgcagtctcctctgtcagagccctcaggtgcagacggcacttgtctgccccctcagcctcagccttggcccacctggtccccagtgccctctcctctggctggggcaggaggacctgccggacatagccagatgtattacggatgactgcagtcagctcccccaggctcctgcttctcttgcctcctgcttttttccccagagctgtctccttatctccattcacttgtctatgggttactcctggaccctggggttaggagttggaatcaggctgttagcgataaaagggttcaagttgactcattttccttatcaggcttagtagttgaagtgacttgctgagcttcataattcttagagaacctgccatgaacccagctccctttctatgactcaccctgccaccctgtgacacatagagtctgaatggcaggtctggggctagaacccacgtcatctggacttggagtccagtgaccctttgggttaagcatgtgtgtgtgtgtgtgtgtgccatgatgcgggaggaaggtccctgctctctgtagctgttttcttcatcctttgctctacaagccctaacagccgattctgtcatccctagtctgcccctctcctgtttctccatctcctctgaccatgatttttttctgtccctggagggatgatggtctcattctcacctcctccacgaaacgtgttagcttttcatattcctagatccactcacttctcatcatctttttttttaaacaaaattttattgaaaaatgtaatatgacgtgtcaaagttgtaaagttattgagtaaataagcatgtatcctaaatattgaaaaatattctccttttgtaccaggctatgtgtcacggctttggcgctttgcacagactattagaaataccttataacattaaaaataggacattgaggccgggcgtggtggctcatgcctgtaatcccagcactttgggaggccagggtgggtggatcacctgaagtcaggagtttgagaccagcctggctaacacggtgaaaccccgtctctactaaatacaaaaaattagccgggcatgatggcacatgcctataatcctagctactcgg

SEQ ID NO: 1958 - DNA, 16 bp, synthetic construct
  source 1..16: mol_type = other DNA
gagcatctaatacagc

SEQ ID NO: 1959 - DNA, 16 bp, synthetic construct
  source 1..16: mol_type = other DNA
ggctactacgccgtca

SEQ ID NO: 1960 - DNA, 17 bp, synthetic construct
  source 1..17: mol_type = other DNA
gccatggagcgctttgg

SEQ ID NO: 1961 - DNA, 22 bp, synthetic construct
  source 1..22: mol_type = other DNA
tccacagtcagcaatggtgatc

SEQ ID NO: 1962 - DNA, 25 bp, synthetic construct
  source 1..25: mol_type = other DNA
tccaggaatggcaagaccagcaaga

SEQ ID NO: 1963 - DNA, 16 bp, synthetic construct
  source 1..16: mol_type = other DNA
  modified_base 1..3: mod_base = OTHER; note = cEt 5-methylcytidine 3'-phosphorothioate
  modified_base 4: mod_base = OTHER; note = 2'-deoxyguanosine 3'-phosphorothioate
  modified_base 5: mod_base = OTHER; note = 2'-deoxyadenosine 3'-phosphorothioate
  modified_base 6: mod_base = OTHER; note = 2'-deoxythymidine 3'-phosphorothioate
  modified_base 7: mod_base = OTHER; note = 2'-deoxyadenosine 3'-phosphorothioate
  modified_base 8: mod_base = OTHER; note = 2'-deoxyguanosine 3'-phosphorothioate
  modified_base 9: mod_base = OTHER; note = 5-methyl-2'-deoxycytidine 3'-phosphorothioate
  modified_base 10: mod_base = OTHER; note = 2'-deoxythymidine 3'-phosphorothioate
  modified_base 11..12: mod_base = OTHER; note = 2'-deoxyguanosine 3'-phosphorothioate
  modified_base 13: mod_base = OTHER; note = 2'-deoxythymidine 3'-phosphorothioate
  modified_base 14: mod_base = OTHER; note = cEt thymidine 3'-phosphorothioate
  modified_base 15: mod_base = OTHER; note = cEt guanosine 3'-phosphorothioate
  modified_base 16: mod_base = OTHER; note = cEt thymidine
cccgatagctggttgt

SEQ ID NO: 1964 - DNA, 16 bp, synthetic construct
  source 1..16: mol_type = other DNA
  modified_base 1..2: mod_base = OTHER; note = cEt adenosine 3'-phosphorothioate
  modified_base 3: mod_base = OTHER; note = cEt guanosine 3'-phosphorothioate
  modified_base 4: mod_base = OTHER; note = 2'-deoxythymidine 3'-phosphorothioate
  modified_base 5: mod_base = OTHER; note = 2'-deoxyadenosine 3'-phosphorothioate
  modified_base 6: mod_base = OTHER; note = 2'-deoxythymidine 3'-phosphorothioate
  modified_base 7..8: mod_base = OTHER; note = 2'-deoxyguanosine 3'-phosphorothioate
  modified_base 9: mod_base = OTHER; note = 2'-deoxythymidine 3'-phosphorothioate
  modified_base 10: mod_base = OTHER; note = 2'-deoxyguanosine 3'-phosphorothioate
  modified_base 11: mod_base = OTHER; note = 5-methyl-2'-deoxycytidine 3'-phosphorothioate
  modified_base 12..13: mod_base = OTHER; note = 2'-deoxyadenosine 3'-phosphorothioate
  modified_base 14: mod_base = OTHER; note = cEt 5-methylcytidine 3'-phosphorothioate
  modified_base 15: mod_base = OTHER; note = cEt adenosine 3'-phosphorothioate
  modified_base 16: mod_base = OTHER; note = cEt guanosine
aagtatggtgcaacag

SEQ ID NO: 1965 - DNA, 16 bp, synthetic construct
  source 1..16: mol_type = other DNA
  modified_base 1: mod_base = OTHER; note = cEt adenosine 3'-phosphorothioate
  modified_base 2: mod_base = OTHER; note = cEt 5-methylcytidine 3'-phosphorothioate
  modified_base 3: mod_base = OTHER; note = cEt guanosine 3'-phosphorothioate
  modified_base 4: mod_base = OTHER; note = 2'-deoxyadenosine 3'-phosphorothioate
  modified_base 5..6: mod_base = OTHER; note = 2'-deoxythymidine 3'-phosphorothioate
  modified_base 7: mod_base = OTHER; note = 2'-deoxyadenosine 3'-phosphorothioate
  modified_base 8: mod_base = OTHER; note = 5-methyl-2'-deoxycytidine 3'-phosphorothioate
  modified_base 9: mod_base = OTHER; note = 2'-deoxyadenosine 3'-phosphorothioate
  modified_base 10..12: mod_base = OTHER; note = 2'-deoxyguanosine 3'-phosphorothioate
  modified_base 13: mod_base = OTHER; note = 2'-deoxyadenosine 3'-phosphorothioate
  modified_base 14..15: mod_base = OTHER; note = cEt thymidine 3'-phosphorothioate
  modified_base 16: mod_base = OTHER; note = cEt 5-methylcytidine
acgattacagggattc

SEQ ID NO: 1966 - DNA, 16 bp, synthetic construct
  source 1..16: mol_type = other DNA
  modified_base 1: mod_base = OTHER; note = cEt thymidine 3'-phosphorothioate
  modified_base 2: mod_base = OTHER; note = cEt guanosine 3'-phosphorothioate
  modified_base 3: mod_base = OTHER; note = cEt 5-methylcytidine 3'-phosphorothioate
  modified_base 4: mod_base = OTHER; note = 2'-deoxyadenosine 3'-phosphorothioate
  modified_base 5: mod_base = OTHER; note = 2'-deoxythymidine 3'-phosphorothioate
  modified_base 6: mod_base = OTHER; note = 2'-deoxyadenosine 3'-phosphorothioate
  modified_base 7..8: mod_base = OTHER; note = 2'-deoxyguanosine 3'-phosphorothioate
  modified_base 9: mod_base = OTHER; note = 2'-deoxyadenosine 3'-phosphorothioate
  modified_base 10: mod_base = OTHER; note = 2'-deoxyguanosine 3'-phosphorothioate
  modified_base 11..12: mod_base = OTHER; note = 2'-deoxythymidine 3'-phosphorothioate
  modified_base 13: mod_base = OTHER; note = 5-methyl-2'-deoxycytidine 3'-phosphorothioate
  modified_base 14: mod_base = OTHER; note = cEt thymidine 3'-phosphorothioate
  modified_base 15: mod_base = OTHER; note = cEt 5-methylcytidine 3'-phosphorothioate
  modified_base 16: mod_base = OTHER; note = cEt thymidine
tgcataggagttctct

SEQ ID NO: 1967 - DNA, 16 bp, synthetic construct
  source 1..16: mol_type = other DNA
  modified_base 1: mod_base = OTHER; note = cEt adenosine 3'-phosphorothioate
  modified_base 2: mod_base = OTHER; note = cEt guanosine 3'-phosphorothioate
  modified_base 3: mod_base = OTHER; note = cEt adenosine 3'-phosphorothioate
  modified_base 4: mod_base = OTHER; note = 2'-deoxyguanosine 3'-phosphorothioate
  modified_base 5: mod_base = OTHER; note = 2'-deoxythymidine 3'-phosphorothioate
  modified_base 6..7: mod_base = OTHER; note = 2'-deoxyadenosine 3'-phosphorothioate
  modified_base 8: mod_base = OTHER; note = 2'-deoxythymidine 3'-phosphorothioate
  modified_base 9: mod_base = OTHER; note = 2'-deoxyguanosine 3'-phosphorothioate
  modified_base 10..12: mod_base = OTHER; note = 2'-deoxyadenosine 3'-phosphorothioate
  modified_base 13: mod_base = OTHER; note = 5-methyl-2'-deoxycytidine 3'-phosphorothioate
  modified_base 14..15: mod_base = OTHER; note = cEt 5-methylcytidine 3'-phosphorothioate
  modified_base 16: mod_base = OTHER; note = cEt adenosine
agagtaatgaaaccca

SEQ ID NO: 1968 - DNA, 16 bp, synthetic construct
  source 1..16: mol_type = other DNA
  modified_base 1: mod_base = OTHER; note = cEt 5-methylcytidine 3'-phosphorothioate
  modified_base 2: mod_base = OTHER; note = cEt guanosine 3'-phosphorothioate
  modified_base 3: mod_base = OTHER; note = cEt adenosine 3'-phosphorothioate
  modified_base 4..5: mod_base = OTHER; note = 2'-deoxythymidine 3'-phosphorothioate
  modified_base 6: mod_base = OTHER; note = 2'-deoxyadenosine 3'-phosphorothioate
  modified_base 7: mod_base = OTHER; note = 5-methyl-2'-deoxycytidine 3'-phosphorothioate
  modified_base 8: mod_base = OTHER; note = 2'-deoxyadenosine 3'-phosphorothioate
  modified_base 9..11: mod_base = OTHER; note = 2'-deoxyguanosine 3'-phosphorothioate
  modified_base 12: mod_base = OTHER; note = 2'-deoxyadenosine 3'-phosphorothioate
  modified_base 13: mod_base = OTHER; note = 2'-deoxythymidine 3'-phosphorothioate
  modified_base 14: mod_base = OTHER; note = cEt thymidine 3'-phosphorothioate
  modified_base 15: mod_base = OTHER; note = cEt 5-methylcytidine 3'-phosphorothioate
  modified_base 16: mod_base = OTHER; note = cEt adenosine
cgattacagggattca

SEQ ID NO: 1969 - DNA, 20 bp, synthetic construct
  source 1..20: mol_type = other DNA
  modified_base 1: mod_base = OTHER; note = 2'-MOE guanosine 3'-phosphorothioate
  modified_base 2: mod_base = OTHER; note = 2'-MOE 5-methylcytidine 3'-phosphorothioate
  modified_base 3: mod_base = OTHER; note = 2'-MOE thymidine 3'-phosphorothioate
  modified_base 4: mod_base = OTHER; note = 2'-MOE guanosine 3'-phosphorothioate
  modified_base 5: mod_base = OTHER; note = 2'-MOE adenosine 3'-phosphorothioate
  modified_base 6..7: mod_base = OTHER; note = 2'-deoxythymidine 3'-phosphorothioate
  modified_base 8: mod_base = OTHER; note = 2'-deoxyadenosine 3'-phosphorothioate
  modified_base 9: mod_base = OTHER; note = 2'-deoxyguanosine 3'-phosphorothioate
  modified_base 10: mod_base = OTHER; note = 2'-deoxyadenosine 3'-phosphorothioate
  modified_base 11: mod_base = OTHER; note = 2'-deoxyguanosine 3'-phosphorothioate
  modified_base 12: mod_base = OTHER; note = 2'-deoxyadenosine 3'-phosphorothioate
  modified_base 13: mod_base = OTHER; note = 2'-deoxyguanosine 3'-phosphorothioate
  modified_base 14: mod_base = OTHER; note = 2'-deoxyadenosine 3'-phosphorothioate
  modified_base 15: mod_base = OTHER; note = 2'-deoxyguanosine 3'-phosphorothioate
  modified_base 16: mod_base = OTHER; note = 2'-MOE guanosine 3'-phosphorothioate
  modified_base 17: mod_base = OTHER; note = 2'-MOE thymidine 3'-phosphorothioate
  modified_base 18..19: mod_base = OTHER; note = 2'-MOE 5-methylcytidine 3'-phosphorothioate
  modified_base 20: mod_base = OTHER; note = 2'-MOE 5-methylcytidine
gctgattagagagaggtccc

SEQ ID NO: 1970 - DNA, 20 bp, synthetic construct
  source 1..20: mol_type = other DNA
  modified_base 1: mod_base = OTHER; note = 2'-MOE thymidine 3'-phosphorothioate
  modified_base 2..3: mod_base = OTHER; note = 2'-MOE 5-methylcytidine 3'-phosphorothioate
  modified_base 4: mod_base = OTHER; note = 5-methyl-2'-deoxycytidine 3'-phosphorothioate
  modified_base 5: mod_base = OTHER; note = 2'-deoxyadenosine 3'-phosphorothioate
  modified_base 6..8: mod_base = OTHER; note = 2'-deoxythymidine 3'-phosphorothioate
  modified_base 9: mod_base = OTHER; note = 5-methyl-2'-deoxycytidine 3'-phosphorothioate
  modified_base 10: mod_base = OTHER; note = 2'-deoxyadenosine 3'-phosphorothioate
  modified_base 11..12: mod_base = OTHER; note = 2'-deoxyguanosine 3'-phosphorothioate
  modified_base 13: mod_base = OTHER; note = 2'-deoxyadenosine 3'-phosphorothioate
  modified_base 14: mod_base = OTHER; note = 2'-deoxyguanosine 3'-phosphorothioate
  modified_base 15: mod_base = OTHER; note = 2'-deoxyadenosine 3'-phosphorothioate
  modified_base 16..17: mod_base = OTHER; note = 5-methyl-2'-deoxycytidine 3'-phosphorothioate
  modified_base 18: mod_base = OTHER; note = 2'-MOE thymidine 3'-phosphorothioate
  modified_base 19: mod_base = OTHER; note = 2'-MOE guanosine 3'-phosphorothioate
  modified_base 20: mod_base = OTHER; note = 2'-MOE guanosine
tcccatttcaggagacctgg
